United States Patent Application Publication US 2026/0058010 A1 - sequence listing, part 46

SEQ ID NO: 507 - DNA, 732083 bp, Homo sapiens
  source 1..732083: mol_type = genomic DNA
ccagaaaccagttcccctcggtggaagccagttgctttaggggtggtgcggcttgtatgtggatggacaccatgtgtgcactgagcccaaattctctgttcttcttgactaggaagctggatttgtaccagggaccttttatctaaataggagactctgggctcaggagaacagagccgacttgacaaagtagaaaagagctcagtattggtctgcccacgctttgggcatgcgtgagcactcgcagcaaaacacagctggcacatctaattttagcctcgcccgccttgaaaagggaccctttaaggaaatatattttatctgaaacaatttgtattataatgtagcagctgatagacatgacagaatattatcattggtgggaaaaaactctgccaagcaattatgatttttgttcttttttttttagatgatatcagtaaagtgattaaagcatcaatgcaacaaaataatcataaagagagagacaatgggagaaacagattttatctgtaaaatatctgacgaacctaaggggtcacttcctttgattttttttttttttttttttacaaaatggatgtattttaaaaaagttattatttttgatatgttcagttgatcagtccaatctgatgacatgtggcattaatagtagtcctggagtagaccctaaaatttcttcaatacttaacatccaccaagttttccaggtagtaaaaggttagtttctcaatcagctcttggatgcgtctggctctagcgtgttaacagattttgaaagcatccgggacttacttttttcccctttaaccagcaaggttagttcccctgcctttatttcttttcctttctcctccttccttctttcgtcctctcttccctctcttctgtgttttgtttagcagtgtggcttaccttggaacttggcaaaaagaggaacaaaaagcagctcttgtgtggggtagatggaggagggataagaaataatccaccgcccgcatttgagttcttcaggttcagttccagcggcagcagcgttgctgcaaaaatcgcttgctattcgagatagccagcagagggaatcggaactttgcttgcagcaggggttgaagcagcctttttttttttttttcttggaggaaatactgcagccttctggactgcgtacgctgctccctggagaggctctctcggttccacccaccggctggaaggaggggaagtgaatgaaaggacaggacaagccccgaacaccatgtcactctgggagggagacagcagcaactaagctgtacaaggttttttttttttttttttcttcctttttttctttttttttttctttttcccctttctttttctttctttctttctttttctttctttctttctctttctctctctcttttttctttttctttaaggtggggaaagagacaaccaagagacaggaagctgatctgcaaggattcggagttgtgctaaaaggactttgatttttttccccctttacgaacgctggcaattgacatcactacagacagcctggttagagaacaaactgcctcatcccaagtggaccccggcagctgggggaagccaggcaagatctgggaaggctgtgtgtgggtgttttttctacagatctcactcctcgccctttttttttttcctttggtgtgtgttttttgttttgttttgttttttaaaaaaattcttgctgtgttggaactagcgagtggtggagtctctgaagcctcatcagtcaccgggactgtcaggaatagtggtttaagaggaagctcggcctggggcactataccctgtcatccagttccctgcctcggagataaagattccagctacatgggcaaacgcctggatcagccacaaatgtacccccagtacacttactactatcctcattatctccaaaccaaggtatggcttgacccacggtctggcgatcagcgtggtatcgttctgcacttgggatgggaaacagacaggcgtgtgaattattagttaacccccacccccatcacttcttcctgcttctttgaaattagtgacataccaatggagttaatgaggcagaggaagacataagaagaaagcagcaaacccggaattgtagctttctctttaaggagagataatagtttcacttgagttcagtttctttgttgttatttggcagcataaatggtcctgatatcaggaacgtcttttgcagatgggcacggtttttagaaagcagatcacaacagtgattaccaggcacaagaatataatttcaggggcttttctggtgagctgttctttgattgtggctctaaaagggtttttcccactggataggacgtgcaacggtgggggtaactcaaacttttaatcgcagggtatagaatgaaagaagggtgtgagaaggtatagggctcctaccagagtctctgagagtttatttttatttttaatttgccttgcctattttattttatgttgaggatgatcagcatgctacagactgctttacaatagatgttctttacttttagaagatctatttttctgtgtagctgccatgaggaggcctgagtcttgaaaaggaatgaaatgtaactgatcataattggacttgaattggttaaatactttaggctttatgtgtgtgtgtcaaatgaccattaggggcccagaggcaagcccacgtaagtaagcagtgggcagtacctaccctgaactttatcctgcagttaagacatgaaagactctcaggtgtgaaatcactgctccgatttgtcaattaaattggacttgattagggggaaaacatgttagcggagtgaccacctcgagtgtacgggtgatattattttgtattgcattagcattagccagactccaccgtctccttaataaataaatatgccgagagtgaacaaggcgtgcctgaatgatctatgctgtcaccaggactcggtgatgtgattagggttaggtaattcatgctgtagttatctgtcatttattttgtctcgtccagcaacgcctatttgtaaaccagactgggaagcagactttcagtattatacaaaagattattgctttgtttttttctttttcaattgctttgtaatccaccctgcccctccaaggtcgactcacactgctatttgcctttgtgagcatttagtttgtgctgctgatgcttaaatagactagccctcctgctcggtgccttaagttttaactctttgggggtgttaggttgagaatgctgcctgccattcctcaaggaaatggcagagcaaggacaagttaaaaggggaaaatttacagtcatttctcatgcctcaacaaaacaaaaacaataaactcaaaggttgcatgaaaaatatcagacattccatcccttttactcatttggctacatttttccaagtgtttcaaaaattacactttgtttcgggtccttgttttctactatggtatatattcagaaaagaaactttagattgaaatgaataacataattgtttttctgtttgagacttcttttaacctattactaacaggaaatagtgaatgttatgcacattttttcaaagacacaggctgctggatgagctatactagtagaaagtgtgtgcgagagagagaaagatggggggtaaagagagagagtggagtagtgagggaaaagagaggagcctgaaaaatagggagattgtagatatctgttttggagttctatgtagtttagtgttgtatagacaggcggcatctggatcttgttactctcaagctagccaacaccttgaacttctggaacatttttaaagaagttagatccattaggcgtcctatgttgatatttggataatcagatcaggatagtagggaatataagatcagctattttgcctatcatggtagttcacattgattattatgttgtaaaatgttgacaatgctttgaagttgtcctgtattgttatggtggctctgaaatgacagacattaatagcattcctggaagctgaagatgagaaaatgtgccctgttttgaaacttgcatagagaggaaatgagatgaagagtcaatgtgcaatcatattttaaaatgtgggtactggggattttctgacagggttaatactatacaatgaagtaccatcatgtttcagtgtaacaggaaaacaactgggttatttccacatcactttttgttccttctacacttatacctcaaaatataatttataatcattttaaatgaagtacatgctgcttatatttatttggtaagcctgggtggaattcataaaatccactctttgtagccttggcttggagttataatccaatttgaaattcatagctatttaaaatgatgctgatatgtcaataatacttatgtttgatgaaaatagagtctacggtaggtaaaaatcgtattctggtgataacatatcttaaatttttctctaaattgaggtaggttttcttcctgccaatccacaagggctatttactatcattagttttttggggaaaatcttcatgggattttaaaggattgaaatgtttattactacattatttcagaaaatgcacacatgctgaactctctttttctacttgtgtaatgataaatacctttgctattttttaatgataaaacaaaatgaaaatgagatttaagaaataaatgcagatgtttccattccctggaatacatagtaaagttttagaagaacttgcgacacttccctgccttctctgctcctattattttccattgcattggaatgaatctctcaactttgtttctttaaaagtaaatgtttatgctccttcaaataatttttcaaatccttaaaatgttatatattagaaaaatatacatgtaagttaagatgaaaacccagtggctgactcatatctataatgtgtaacaatgttgtcatcctgtgctccctctttcacacctcacgtctttaaaaagttgtcatttgtcaattttctttttgatgaatttttctttttttttttttttttttttaccaaaagaagcaatttcaaggaggaacattacttcgcttaaggaataatgaagaaatcttagtgatatgttgtaatatttaaataagaaacaaccggatgaaaaaatagtttatcaaggcaaatttgctgtttggaagggacacccagaataatcagcaagttttagagaaaaagggctcaaaaaatagttcattagcttaatgacaaaatacaaaatgtttgattagttgtaatccaacattttttaagtattttatcaccctttccaaaaaaaaaacaacctgttgctgttgacttatgagatcccagctgaatttcattctgaatttttgaggtacttgccggggtggggtgggggtgggggtggtggtggggagtaggtgggggtggatggggggttcttgaaaaaaaattagtcaagctaggtaagctaaaaagaagaaaacctggttacagcccggtgaattgatttttttccagccgagaaatagatatttctctcacatatatttggaaaactttagtcatcttcataaaacttaaaaagttacctaagcacacacagcaagtttctcctttcttccttttccacacccttaccagttcactatgtttctaccaatccagtgcccagttgccaatgatgttgctctcacatgaatttactgcattcccttctggttccccagaaggtcttgaagaaagaggttcagactagtggacccaaacagaatttcttggctggtgatactcagattgtgttcagagcctggtatgaagaaggggccaggtgtaagaagtagttaatcaactgcacgttgatttcaggctgaatattcaaccatctgcagccacccgtctctaaaagtctagctgaagcacaattgattgtgccatagaatgagcaaacgcttgaaaacacaagtaggtgaaggaagagaggcttccacggagcaaaggatattcttaaagatgtgaatgtacagatccttcaaaagcaaaacaaaacaaccctgtaacaccctccttacacatgaaaatgtagaaaatcttgcagagggagggaatgagtttagaatttccttagtacttcctgcctcagatttgcattgatatccagttggtaacttgccagttgttttaaaacagccttgaaaactccaaagttctgttttcctttgaaagcctgaaacatacaaaactagttttctaaaatcttccagcgatagaatttttaggtacaactccaaatattttctttcgcttcggggggtaatataatagcatgaaactatgatagcatgaaactatgataaatcctgtttgtctcactttagactgtatagaatttttaattggtttcaaataagaggaaaatagaaggaaggggccatccttgtttcttagttttgtttttttttcttaactcccccaagccttcattatcagtgggattgaacacaatcccagtgcatgttttgctattttttttccatgatatagacattgtttttgcaacactgagtttggtgcctacttaaaaggagtagaaacgtaaaaagttcatggtattttcttttctccagaatggattcaaacttaaggaaaatatcatgtatatttaacagcatctttctaaagcattttcctttcactttctttcaatttggaaaaaaaatagcacaaaattatagcacaaaattatttccatgaagtaataaaatgtatctgagggctgggggtagggataatttgcagggagggacacaatatagaagggaggatgcaagttcattctaggtctttctggcttcaggaattctggaaagcttcatttttgcactagtatgattttacacaacctttttgacattatcagtcttttggcagagagagttcagtcacaattatgcccatgtcaaattctaaaatcaaaccaaaacaacaaaaaaagtattttcttttaaaataaaacttttttaatgtcaaacattttattcagagtaaatggttgatgtttattcaaaattggcttcaagtactacattgaaattgttttgtaacagtctcataagccacagctgtatgtgattaaatagtgtaatatcaaaagcatgtgagaatagacgtttttatgctatagctattgcacagcaagagtgcagatggaactgaagggagaccaaaagcgaaaatgtattcatgtggtgtaatacgtgtgttgaggatatgtgttgctattttttgcagtagtgggaaaatgttgaactattttggatgtgcttagaaaatatcctctcggaaaacggaaacagacatataataccatttttaaaatgtggagtggatcatgccatttaattagaaaacacataggtgctgaatagatctgaaaccaattcaagtggaagaatgaaaattattcccattgagtacacattcaaaaagcaaaagtgactttctcatttctgttttgaaattataaatttttttttactactttaatttatggaactattgtaagaaaaccttcatcccattgatacctaaagaaaagtattaggcaataagaatcagcaacttacagatggcaaaataggtggcagtatattgctttttaaagatatttggaaatatgatgctcttcagtgttgtataaatattgctcttttcttaccagtgttaaaaattacaaagatacacaaggacatacaacttttgcttccatttctgtaacagagatgttatcgtaaagaggtgtctagttttaatgaggtgatttaatacagtgtttttgaaataatatttgttaataaaaattaataacctctagcttcctagagataataaatctataggattaatcatactaatcatcactaccattcatatgtgattgttttcagggccttgagaaagcttatagaattggctatttttagatttcagattttagacagaagtaattttaaaaagaaaaagagagtggcagactgagatgagttaaattttgcttggttttgtttttatttttttttattttaagttgatattggcagataatctggtcttattaaaaatgttttgttttatccatgtaggtttattactcagggagtatgtattatgtggaatcacgaataaaattttaataattcaaaaccaattcctaataaatatcaaatttcaaaagtaaggataataaaagaaagataatagatcctatcattttgtgggggaattctctgatttgtatgtcaatgcattggtttctaggttgggttccttcactaggatcccttccattgtgagatagctgagcctgctttagtatcttagtggtatcttcaggtgacctcggttttgtgtcattcatgagtttttcttttgttcccagatgctttccacagggcagatcaaatgctgctttactggctctctggtgatttgaaaaatttaactgtcttcatcctttcacacatctaaatccagtgcactgagagaaacacgtccatcacttgggagtgggtggatagaagttcccaggagtggaacaaaatgacagccattctttaatcatgaccttttccagctttattgtggtggttacaatttttcttctgagtgggtaaaattaaggtgtatccaaaaacttaattgtgatagtatgatgctttacttttcctcatttaacttcctctctacaggtggtgcagagctaaatggttatgcatgtttggctaaaccagttgagttaatgaaggagactagaattgccacattaaaatactgacaactttagtttcatgaatgattataaggagtcagtgtaactataacaattaatgaaatattatttcgactgaatccaaaacctacaaatccgcaaaacctacaatctctgaatctcagaatagtagcctagaaaacgtgggaactgaatactgtggttacctcagctatactgtagtattgtaggagggaaataactccccaagggcatataaacaagaacattatcttttctactttttcttttgagattcccttcttgtttttcaaaaagcccctgttagctgaattaatgaaagcaaatgacatatgctattttaaattattatttaagctttgaaaaatcatacattattttcatataacttagtccataagttcctattatgcttgcttctctgagtatatttggagtataaaacaaggaagataatcctttgggaaagttggtttctgttcatatcagtctgtgtgttcatttattcatttgtgaaatgggtgaaataaccctgacctcaacaatatattatagtggcctctgctatggaaggtatgaagttactgaactgttaagagaagggtggtccatacataagtagcaatgttatcatttctgaagcccaactgcatatttttatttactttattacagactcagctctgaggtgggtagcctgtctttaacacagaaaagagtttaggaactcctcaaatgtgtaaaggccatttctatttgctgaagcatagctcttcaccacttaatcattgaaaattatgttgtagaatatttagtgatgggggaatgtttataatacatcaaatggttaaaacagttaactatgttcctaatattataaaagcataaagaatccaaatatagacatataaaaaggcttaaagaaaatatatcaaattctcaaggaaaataaaaagtaaatggaacccggaattttgtttcatgaatgataaatacaaaagtgagactcgactacatgccttattagtcaagggaaccctaatagtgccctttcctgttgtgtggaaagtaaggtataataggagaaaagtaaatctaacaatattttaagttttaggagctgacatttaaatttgttttagacttaactttcctatcattatattgtgaggttaagaaattggcatatattacattcaatatgctagatgcaaatgatcttctggtcatcccactcttagctgataattttcaagctgaatatagatcatgcatagaatttaatatggatttttttagagacagcttattgttttttaatcctgtgtactactacttagtcattttccctgactgatgacaatttaatgaaaagtgaaataaaaaacaatactaactatctggttttctggaactggttaaaatatattgaaagtttttcttatgtatgtgagtcatatttgaggctattgtcgatgtctgtaaattctcatgttgcttcttttaacacttgtcaatcatataaatggtattctgacacccaatatataacttaaaattaaataacttagaattcaagcaaatatattttttaactagttttgagtaggtgaagtatttgaagtatttaagagacttggaatgattttggtgacattatttgctaataattaatctcatctccatctttatgtaaaatttcagattgttttccgggatactcaacagataaatatgtgacagacctatggcctttaatttcttcttgaaagatgagaaaacaacatttcattttctttgacttggtgggaactacccttggagggtggtgacagttcatggattaaccctggtatcctgtccattaccaatgtacaccaattctgactgcatctttagaaataagaatattgcatttttagtctaaggtaggtagggaatcctggaaaggataaaattctgatgtccttttctcaatgtatttcaaaaaaattaaccactgcttttaaactttattatttacctgtttaggacaatttggcttcatgttagcaatggaagtttctctttctgactcgtgtttaactttgttgttgagctggaaaaacacaagaaaaggccagtgggaatagatgaaagaacatgcaggaatttctcttcaagttttgctatttcctgtaacaatagacgctttttgaggcctccattccacatccaaagacacatattaaagtgcactaacattcaacaccaaatttaattatttcacaataatatgttgaaaaagcttttataattttgctcctgaaactctgtgtccaagtaaatttaactgatatgtatctgtgaatttggagacatcttgcatacatgaatattcttgcgaagtgaaaaaaacctaatctacaaatctttttcaggtacaaagagattattagaagactaagtggaacaatgaataaagttgacaatgtattatgttttttagatatgcatataaatgttaattgatttgggttttgcagtttttcttttcagagtttggagttaatgcatttgtttccttgcaccagtgtttttgtaggtctttaagatggtcagagcatctaaaaagctggccatatctttcactattgtggccttttggcactcaaaatatctctgtattttagtaatcccaaatttccggggagggacatgtggtagaacagcacagtgtattggaaaatgtcattaacattctttggctaaaatatttcaaaagcagacacattggattgacctttggcactgagagcaactgggagttccagatctgggtgccaggttcacagaattttttattgcgtaattggtgaaattgtttactagagacagagcttaaatgtaacaggtgtttccctagggcaccctcttaggggagtaggcaagaggcaaatcaatggcacaatacttattctatggcataatttttctcaattcttctgtctcaaaatagggtcataggttttttatatgtattaaaactgacatttcttccttttccccagttcccacggttatttacctaggataataacatctcttggtgtctagaagtctctctcagccctagagaatctacgtgccttttaaagaacacatgtctctacaggtatgcacactgcagctagacccactatcactctcacaagtggttgggcaacctgaagatactgctactccagccataagccaagtgtgatggtttccttcattttcattcttatcccagtgttacaggaaaatcaagatcccaagcctagacatagccatcttctccaatcttattcaggaaataattttttctctctgtagccccatatatatcctcagacctgaaaattcacaccatcccccaatgctggagggcgaattctctcataatcaccctatgttttgattctctatctaattactcaatttttcttcccagccctctagacagatctcactgaatttcatcagcagatgcaatgaatcagctttgattgtctctcttacacataaaacaacaacacacacgcacacatacattcctgaaaaccttaacgattattttaatggttcagattttctctgaggctttacaaccacagagaaatatggaggtgcaaagtggtcctaagaagacacattcctgttctttccagttataatttatttaattttattttactttgctgctagttggtagcacaaaggggtgagtcttaccaaaatagaaataactactatttttttactttctttcacaaatattgtggtaccttctcatgatctgagatacattgacagtatattacgcaagttagctatctactctcttttttatgtcattcttgatagcatcttttggaaatcttattgattaattctaattcatcccaaataatttcataatagtcgtttaaactgtgaagagtctgatgaacctcaaagcttttagtgatgaggctgtcaatagcagcctagtaaaaaaagaaaaaaagatgacagttctacaacctcaaccggttatttataagaaacaggaagaaagataaaataaagagaagaaagagaaaatgaactaaagagaaagattaagggtatcagggctcaatgtacttttgaacatttctggaatttgacaacttgttttcctttccaaaggcaatagataagagctgtttagcaaggaaaaggtcatttacaaacagaagaaacatgtttggggaaaatacgtcaatgtaaattcataatttgatgtggaggggtcctgtagttgagacttttggtctcttaggaagaaaattaatggttatgtagacaattagtgctttattttgtttttgcacttgttgcagcattcagtaatagccagcatttgcttttgttgttttgacttactcatcactagttctcaagggagaacctgtataaaagccttcttgatgcttttgattggaaagagggatgtttttcagaaagagtcattggaatcaagttttaaagtgtatttttgattttctgtatctaacatattcatatacgatctgtatgtgctcacaaatataaccaggagcaatgttgttgttgttctgtgtggaaagaatctcattctgagaaggaaaaagcaacattagttgtgaacccagcaaagccgtattgccatgagaaccacacagtaccaactgcttattaaacaagagtgaagtttgaggccactaatgtgcctgaggacccaaggagcaggtcagttgagggtatgggtgcagtcatgcttacttactctgggctaacataagcctttgttagaggggaggagcctggtaaaaagagtgtctagatttcaacatggcccataaaaggctagctgctattgttattattcgtggtccatcttttctgccaaattcattgtatgcatttctccatccttgttttatttaggatggctgtctgatgcaaccttgctttaacattgtgtcttctccatctccctgtctttcccagattgtccttcctagggctaatattttttttttctttgttgtagcttctactcctgtagccctttcttgctcgccctttcttcttctattctcaagttttctgctatggatttgccttctttgtctctctgccctctgatccttaaattctgcttccttctttttgttctctcagctttcagtcttttctttttttttttaattattgctttttatatgtttctctcttttttttacaaggtacagtgggattgggttttaatttatctttttttgcttagttgtaaatttatttttggcttttcaaacataactgtactcttccagatcatatttgtgtcagagttagtctgtaaacagtctgagaactgggaccacagttttgatctctgaatgccctgcaatgtatagtatggtgtatgatgcagattaaggtcataagaaaaggttttcagaaggtattagtctatcttgttttgtgtgtcttgtacattggtccattgctgaaggcagtgcttttttgaaccagagttgcttaatgtcatcttcacctctgtgatgctttatgtcaaaagacatcttttttacatgtccacatggatacaatctcttggggtcctatctttttcacattaagcacatgggtcacttggctagtaccctgaggctgttggcttgagttgggttacattcctaactaatgggaaaaaccataaaacacaagatgagttaagtcagaaactaatagaaaaaaagaaaaaaaaaacatagtactgcattataagttgctggcaagaaagtcaatacacgtgccaactcagtgaggggcagaagtggatttcaaagacaaactaagtagctaggatttggaactgggggatgaaagtaagcaaatatgtcaggattaaatggtagtggtggtggtctggagaagactggagaggcaattcctcagcaattgccaagaatatcagcccttatatgtggcttccttttatgggttggcagaaagttggacatatcaggaaactaacttagcttgaagaactaggagatggtctgagttttcggtccatctttttgtcaattttgtttattcaaaatccagggtcttgactacaatagttcttataataatattgaactgttaaccaattttggactatagtccaggagtaaccagccatgccatatacctatccaaagcaatacccagatgggttttttaactcagaattttgaaaagacttcaagtatcaggtaaaaatgacaaaatacccattttagaaagaaaacaaaacacaatttccctgtacaattacctacgtgggtataaagacatatctaaactaatgcaagataacgttagatgaaattctgatgtaaacttcaaagcttttctcactaaggaatatctgaaaacaataaccctgttgtggctaagagtacaaactgtgattttggtttggacttctcttggtttttccaagttgtgctgaatctcctatgtttgttctgcagtgttctcctctgtcatacttttttttattgcattgaggtccttattcccaattgcagaaaattatatatatatatatatatatacatatatatctatatatatacatatatatatacacacacatatatatatacatatatatatacacacacatatatatatatacacatatatatatgtttcatgaaattttagggaattttttaatttcaaagtaatgcatattttgcatatctagggaaataattcaagatacagcgggaaaatgttaataatctccctcaatacactacacaggtcttcaagagctctctgaaataactaatattaatagtaaggtgtgtgtcttttacagaattctatatgctcttgcaaatagcaatctgacatatgttatatgagatcaaattgaacaggttaactactttttcaatgacaaatgtaatttagatattcttaccaagtttttagatatttctggttttttattgtcatattaattgttcctactttatttgtaccacgttttatgcaagtgttgcccataggtggacatgcattttattgccatcattttgccaatatgaataattctaaaatatatattcagggtacttatataaatactaaaaattaaatctttcatcttctaattaagtttgcttcctttaaaacactgaaaattgccatgatgagtttcgtattacacaaggattaacatctctctttggcccaaaaattctgtgccctgcaaggttgtcctgcccctctgtgttttgatgacaggattgtactcttcctttggtaagaagatggacttcctgatggaagtacaagctgaaagggaaccctcacatttggcagaaacaggaatatcttccttcctttgtgacactatcacagatcccaacaagcgcttggggtcagcaattctaggatctcattacttgggggctgctcttttgtgaaaggtcagcttcctttgtctgccaccttatatacaaagtaaaaagggcagcagcagtcaaggacaatgttaagcagcccaactcttcctaataaatttcaaagcccactgaaatatttttgtgctagaacacatatttttttccaaaggctttggaaatcagaatttttatttttacattattatcttgggaatgtgtacaactgtatttcttaacaaccctcatctgttgaacttgtttggcgctgcttaatcagtgtcaagtaatgtcatggtttatcaattgagctggaaaaagtgactctgtaaatctaatggacctaggttaaatctattgttatttcctttttctagcctgtacttgatatgtttctcactttgaattcaaatgttaagatcagagcatgacaataaaaagaataatacaaaagttaacctatttaatatgtgatgctgggatgacacagaactatttgctacctaaaatatgtctagaagatgggagatcataaagtctcaacagtttcttctcctagaagaaaagttagaccaagaatgtgtatttctgatagtagttaatcctctttacatagtcatatttcacagaacttaatcacatctttccaagtttgatggccaaatctcacatgctttggaaactcagggagtttttccttcccaaggacctgaaaagatgacctttttttttttaaacactttagtcaaattagcatttttttttaactgctggaagactcaccattttttaacccacacttaaaaatcattaatatatattatacttaatatacatttagtgagagcagaaacattttaacaaagtctggaaaaggaatttagtaatcagaaacgaaaacagtgtggttaggtgaaaggactctgagtgtgctagtagagtaatagttgtgggaggtccaatttttgattctacaacttgctttaatacgatttccccagagtttctttactttttaatatttcagcttcttgtcacttcttcccattacaagaatatttagttatttggtaaaaatgtcttgaggatcaatattagactaatagtaatgtgtttcagtgttcggtgaagaatgccaatatattaacatattatgaaggtgataaaatataaataagaaccattaactcaaagagattgttattagtgataatggtaaggagagggcaattgaaaagcttggaattgacttgatacgtgaatataatggagcacaaatccttaagatggctccgatcaatgctattcattgaaacatttctttgcacttccattatgcttctccacatccatctctgcaatcagctggattgaaatcatatagagatttgctctcagtatttcttatacttcttacatgaattttctttattgttattttgttttggaaaggagtgcaagtctgtctcagcactctattcaaaactcaccatatagtctgagatgaatatattggaaagttgtctggttcttacattgctatatttcacaatacttgtactttcctcatttaaggttccaggataccttttgtcccctagagtaaataaattagaggggagaaaaggtgtcattttcttgcagccagcttacagagtgccagcccttgcctccctagagtgaaatctcatgtttaaaaatgctgtgagtgaggccagcactggctttgggtgtggtattgggttttaactagataattcttcagactattcactgggaaatgaaggaatggagttttgttttagtttttttcagcttagcattgagctttcaaatatcttcaaacttgctcacatttagcattgctaaactttaattttacccttttgttaatcttcctccaattaccatgattgcctttaccaagctcttcatgctcaaaacccaagggcaatctcaaaggtcttcaagctatgtgatccccaccccctgcatgtggtaggtgtttaataagtgtcaattgactgaatgattggtctacatgaaagtggctgttccacatcctgtactcgaataatactcactgagcaatatattttgggcacttaaccatttttgccttccttttggtatatcctattagctctcagaatggagaatcctccacttcatctttcttctgccctcagatcttacaacagtgctagtcagtatctattgaataaagagtgtatggtttaattccctaccctagatgtcctttaattgattttataatcttcaggaaacttaataaaacctctttgatacttacctttgcttcccttatagtttgctttcttcctttttaataattcaaaataatgtttcactttcaattataaagatactaaagctaagacaaaaatattaaggtaaaattctcctcaaggtgtttggcattttttttttccgggaaatatttggtttctttttgcttactcacatgtttactctcaatataagacgtttatctcaatacatctaccttctcccacccttttatgtacgtttggtctcatgacgttttgtgaaaaagggaaataagatttttcagtgtttgtgcaatgttcaattttaagatcttctagtccagtactgtatctactcattatgtatcctatagttactaatatttgagtttggtacttggaatattagaatgtgaaataaaatgctgtatcaatcaatacatgtttctggagctctccctattgccaccactgcttgggggtggtttggacaagacaggagttataacacgattcttgcccctcagaagttgataatttatttgagaaaacagggaggactcatgaacaaaggagggtaatcaaatgctaagtcatgcgacattgacttaaattgaggagaaagggcaaggactgttggagcaagtagacccttaaagggagaagacagtcttgggccaggtttgaggtgggcatatagttgggcatttggtatattgcttaagtaacagcaggaagggaaagtattcttgctagaataaaagtagaaacataatacaggcacgagattggaattgagaagggacaatataatgacaaaacagacttagatgaaacaatgcatcagagaggcacaaggttagaaagagcacagcaatgacagaaaggctttaagagggcagatgagaaaaagttaatagtggtttaattttggggtagggagtggttttgtaagtttcatttttaaggcataaccatgaatgaaaacaatgatagatttttaattctttattgttttaataaaatgcctacattttgactaaaataatatgattggccctccacatctgtgggctccaccaagcgtgatttctaccaactgcgggttccatcaagtgggggtagaaattatttgaaaaaaaattaaaaataacaaagcaatagtaaaaataatacaaataaaaatatagtatagcaactatttatatagcatttacactgttttaggtattataagtaacctagagataatttaaattatatgggaggatatgcataagttatatacaaacactacaccatgatatataaggaatcaaagcatctgcaaattttagtatgggggtgggggttcctggaatcaatcccccacagataatgagggacaactgtacttacaaatcttcatatagcagaaaacctactacaatgaaacataaaaagctaacaaatagtcttataaaagaaggcctgcagtatatatgacaaaagtttaatatcctagatataaaatttgcttgtacgactcaataggaaaaaaagggagaaaatattctaataataaaagacacaaaaaagcataaatgaagaaacagaaatagctaccaagcactcaaaaatatatgtcactaataatcaaagaaataataaccacgagggagatactatttttgcctacttggtttttaaagagttaaacatttcctaacaaccagagtagacggagatgttggaagacagtcactttcactcattgttcatccttaggggaatattactgaataggtgaattttggatctttatttgagagataatgtatcaaaagctttaaaaacatacatgcccggttatatagcaaaaccaattctagaaatttttgaaaagagattaaagtgtatatctacaaagatgcttattgtcgcactgcttttaacagagaagattataagcaatctaactgtccatcaataaaggaatagattaaatgaatgacgttttatctttacaaagaactactatgcagccatgaaatcaatgaatatggatataatgactgaggaaaataccatactgttagaatttaaaatgtgacaaagcagttttataatatgattccaaatctttctttgaaatctgtgtatgtgtgtacacatttatgtttgtatctgtatttatttgttcctataaaaaatataggaaaagttttgcgtgagttttggagttgcaggcattgttaaatgcttttgaatatgcattgattatcactgcaaaaattaatattgaaaattaagttgtttccaaaaaatgataagaaattaagaggaaaccaagcaaagaagtaaggattttgatgcaattcgtagaaggaagccattgcaagttggttagtagagagagaagtaacatatatagaaagtgctttgattgattgctagtattttacaaaaggcaatgaaacagaaagttaacatttaggaaatcaaggtaaccctgagtaagtatagatagggaagcacaaaacatgtgggaccagagaaaggccaaaaggtggtagatgatatgaagattggaaaaatggagtctgtgatgactctaaaaataaagacattaatccaggtttaaatatattaattatgtaacaatgaggtatccagatgaagatgtgctctagacaaacagaaaactgaagcatgatctaaatccaatgctaaaaaagagacttaagttttgtcaccatggaggcgacatttgaagttaataagtatgaatgagattaccaaaagtgaggatatcaagctacaattatagagagtgataatttatcagaaaagtctaacaagagagctttattcttcttctattctatctgtgctatgctctacttatggtttcagattgtcttcaacatcatgaggattgtattaaggaaataattcgtaactaacaagaatatttgagtgacaagtctcagaaagtttaggaaacttgtttagcagaaatttaacccctcttaacgtctaaaatgttattttccaggttttagtttgacgcttatgtgcagttggcccctgacatccacttcctgttttgctctaatgatcctttagtgtgggtctacccagttttgaggagtttttgtcagaaagaatgagacaattgggcgtattttctttgtttgcttgcttgaattacctttttgtttgtttctttgtgtttgcttttttgaatgaccgactgactgttttatctgggatttgtttctgaagttgtattttagggcatttgttctcaaactttagcatgcttaagaagcctctgaaagacttgttaaaactgatttatgtttctttcttctggaaattctgactcagtaggtttgggatggggcctgagaactagtttgcatgatctcctaagagatgctgatgttgtgggtctgcaaaccagaggtgaaattgcattgttggaagaaacatgattttgaagcccaattttattttcacgtaacgctttttcacacaaagacatatccatctctatcaccaagtacaatattaaattttttttaaaaagtttttttgaagacagtcttactctgttgcccaggctgtagtgcagtggtatggtcatggctcactgcagccttgagcttctgggttcaagtgatcttcctgcctcaacctcccgaatagctgggactacaggtgcatgccaccacattcatccaatttttaaaaattttctgtagagatgaattatcactatattgtccaagctggtccagacctcctgggctcaagtaaccctcccacctcggcctcccaaagtgctgggattacaggcgtgagctacagtgcctgacctgttgaaatttatcactggtggtactttctgattattgttgtatacaaaatagccatttacctagattttaatttgcccataatttaaataataaaaattgttgtttatgttttaccctccctggctctggtgacttcagactttcatcatgtgattggaaagaaaatttcagggagaacacagtggattgtccccacaatcttggaaaaaaaatatatatgtatagtttgtcttctgagagttaaaatgaattgattttatcaatagatgctgaaataatatttatccaggtatatgtaaatatctaacttaatcagtaattttaaaatatatctaaaggaagactacgccacagaaggtactgacagtaggacagatgtgtattgccttggcacagggagaagaaatttcaatcccagagtccaaactcccttgccaatagagagaagttctgtgctatgtggctgggatgcattatcacttgttaatctggtctgggggagaaaatgcttcttgcctgtctatttctttatctcttaattacattttatcagcaaacttcctatgcttttatttctacaaaatgtaaatctgttgatcataaagggatgttttatgttgtgtatcgacaaattagtctcctgggttataccttagtctcatatgaattaaggtgactctgcctccaggattctaatgatctcagtgtgtgctaaaaggtctatttcctaaggcctcagagctagagaacaacatgacagccaagtggtggacccctgaacagccaacagccacacctcaatggagactcatctacttttctgagcactttacctgctgtttatttgttcattcactaggaagcagagctatagaattttataaaactgaaaggagctttgaagtcatcagggccagccctttcattgtgaagttgaggtcacaaccttccattggtgtctgactcttatgaacctggtaattgaaataattcaaaggctaggttcactgctcagaaatatttcacagtgttgtgaggtgtttctcttttgtattatcttagtctgaagtgtggtgcttggcatcaggttcaggtgctaatgtagagtgagaatccattcaaccttaacctctaggccccttccttactttaatttgagagtcacatatctgcattataaaacctgcctattttgcttaccttttcaagtgaactttcattgaatttccctttttaacttttatagcctaggatggcacttcttgataaaaactgcaaagaataagtcctgttgagaggaatacattattaagaacatatcaagagaaaaatacatatcaaagcatcaaataagttaaatggattgtgtacttaccgcaataacagacacaaaacatgctttcaaatattcattaattaataaaggggaatagagaaactcttttcatagcatattagtccgttttcacactgttgatacagagataaccgacactgggaagaaaaagaggtttaattggacttacagtcccacgtggctggggaggcctcagaatcatggtgggaggtgaaaggcacttcttacatggcggtggcaagagaaaaatgaggaagatgcaaaagcggaaacccctgttaaaaccatcagctctcatgagacttattcactaccatgagaacagtatgggggaaactgcccccatgattcaaattatctcccaccaggtccctcccacaacatatgggaactgtaggagtacaattcaagatgagatttcagtggggacacagagccaaaccatatcacatagagaactcagtatttgtttgcttttgtatatagtctgttataatagaaaaaaagatcataaaaacatgattctaatcatgtgctgtcatttttgggtttcagtctttttctctaggagattagttacaaggactagggataacgtatgcaacttgcccagtggatggtactttgtacatattaaagtaatggtaattatatttatgctatatattctaagttaaactgatatttggaatgagtggtaaaactctgagcaaagatagatttaaaagcactaggagactatatctgtactcgccactttttaatgcttcctctgccttctttagattctcacagctggatcaattgataacacaatcatgctgacgaagtcctgtgcccatattgactgacgtaaggaaggctgttacagttttaatctcaccacatagaagatcccagaaataaattactcgtccatgtatgggaatgttgtaatctggtcacaagtaccagcaataccgcagcactctccacaagaacacccctaggaaaccatgttgcccttgagttttcatagaattgtagttctctcctagtccttactcattaactggttattccaccggatattaccacccactttgtgttatgtgctgtgtttcatagtggggtctggatcccctgcattgttcatagccatcttcctcctgaatgcaatctagtcccttgctgaacctttcctttttcactcctcaaattctcagatatggctcttcaccaacttgactgtgtgttcttgatttctctaccataacaatatatatcctcagtgactgcttcttgaaacaccaagtttgctcttaccaactatcttctctgcccctgcccagctctatgacctctcctcctcctcactctttcatattccagtcacgatggccttctttctgttgctccaatatgcccagacctttcaagccccaggaccttggcaagagctcttccctcttcgtcagtggccccctctcccagcccaatcttaacatagatgattcttgtttttcagaccccagcttaaatgactttgctgaccacctagtttaaaagaattccccaatctccattgttttaccatattttaatttcttgcaatgcaatttcctattgttactggatatttttctgtttattttcttacttgtttgctaattgccttcctattaaaatgtaaggtctacaagagcagatatctgatctattacattctttgttgtatcccaagagctgagaacaatggcttgttctcaacacaatggtaggtgctcaatacatactccttgagtgaataaccagctgcccctcaggtttatgcctagacctggttctgttctcccagttcctacgccaaattgtatgccagggtagtaatccctttgtctctgacaacaaaaatggatctacccaacttagatacgttgaccagcctcacccacacacatactgtagccagggtgacattgataattgatggttattatgcccaccacaattttgggattttcctagtgttccaggaggcaccttgagtttacctgagcatgaaatcaaaatagcttgcctattgttgatccttgaagttgtttccagatttccattttaccagaattgaactgatgatacttatgcacatgctctttaagcaaagtgattttccagaggaaattgcttagggaaagtttgtgctttattttaaaactacctgaaggaagttatcaaaatagtaaactgcatagattcagagtttgggtcccactgactcagctgtcacagaatagtcagaaggaagaatgaacatcaacagaccagggagcattcgttacttgttctaaaaacacatgaagaaacaatggcacatgtgtcttcacactcccatgcccatctgttgcttgacatatcttttcttttagacctttagaaaatctctgttctgaaaatcgcacagtatggatatttgattttgcatgtacggcatctagtgttccttgttttcataattgcataccaattttcatgttggaaaactaatctcccattggatatggttttggttcaattgcttatcaaagggtaaggcacctggacccaaggtggactcttgactcaatctaggaatagcagctgttcttttccaagaagatacatgtggatttatccatgttatctttagtatttcaaagagactattggcttcttcagcttagatcctcagaccttctcttgctccttctcagaagcttgcctcttcagattttcctttgctttagttaacctagttggcttttgttttattttgttttgttttgactaataagaatcaattagtgccacttgcaaccataaaaccttaattcacagaaagtaagtaatgttggacaataataagataaagaagtgatatttagtgttatggagaaatacagcagagcctcagatttttcctcccttccttctacatttctgccagaaccagaactatgtcatatccatatacataaggaagaaacactaattacttccaaagaatgtagagtgtccctatagaagagcctccctgcagaggctcccttcagttgatcaagctgaggctctatctgcttgactttgcttatgttctcccgtttgactggagtctttctcagttctttttgccctgtttctaccttccatgttctcctcatacactacctcctataactaagtcttctgatattaaaattaacctttttcctcttcttcactgagtcttattcattttgtggaccccatagcacataaccaaaagccttgcatcttgtttctatggcaaagccacatttaaatttattcgttagattaatgaaaaaacacacaattaaaagaaaacgcactgttttaaaattatattcactgcttaatttattgaccttgtttaaaattgctgctagttctatgcctactatttccatttcagtcttcaaactcaggcagctttaattctgtcctctcaatcattacttccctccactgaccaaatgtttccacctgcattggtgttctttccacagctggtcatagagctcatcaaagcattgtactttagctacagaaattgtaagttgagggttggaggaagatccaactttctccaatgtaaatatttctgcattgcttataagcaattacatttgtatgttagtcctattttaagtagctcacttacagctggtactgagcaatgagtaagcatgtggttctctatttataaagtagcccctaatctctcaccatgataggccagctatacatagtggtctgttttgagagaggggttttctagaggtcaggattatgtggctaaagagcagggaaacccaggaaaatgtaagtgattcaccacagtgtgctattggtgtttccttgggaccatgatgttgttcagtgcaaggtgaaagcctgagaagaacagatgagagacgctgtttagagtgacagacatgtagtaagtggctgcctttgattgtaggatttcaagaaaaaataaaagaaaaacatgttatttatgggttcgaataatattacaataatccaaaggtagttttattctagcagtgtggaaaataaaagcctttgtaaattaattgcttgtctatgatatgagaaagcacagagcaagcgctgttgaacataaatcaacttgatttataaacaatttgttattcatctaagatatttaatagtatatattaaattcattttgttatataaaaattaatgagtgaatgattggtaaatgcataaatgggtaaattacataaatcaagaaaattacccctcacacttttgcttttgagttaaatttatgaaaaatgcactagattcctcaccactaaaactttctatatattggaaacccaagttgttttttgttttaactagcattttgtaagcccattaagtagtataaatttctgttatttttaaatacttgtcagcagtatgttttgcaattggaatgaatacttagacaaataaatgttgagtttaacttctcatagagttacaaacttctcatagagagttcaggaagtgtttgaattcatggtggctttacttcattcacctgtatggttggggacaattccattctaaatacatttattcagcacctgccatatatcaggcactctgttaggttgaaagtgttggctcattggagaagacagagttatttttacattacatttccagagtatatcacagtgtttggtacatagaaagcacttagtcaacaatgaacgtataagggagctaaatcactaaatggttttaagaagagaaaataaatgcttactatgtgatgcagaatatggttagtgttatatttgatataggaacctgccagggctaaaaaaaaatttagagattatgtaagtccgaaatattggtgaaaatttcatggaggatgtgcgatttgatatgaattttaaataatttatagaattacatgtaaatgtctaaaggaatggtatggccaaaggtctggagttggaaatatatgtgcctgaaagaaatatagcatagtgattaaaaaaaaacaaaaaaaaacaaaaaaaaaaacgggaaagtaaaactgggaaagaaaattttgtcaaaaaaaaaaaaaaagaagaaagcttgattttggaagcttggaaaaccttgaatgccatggtaaggatgctgatatattttatctggaagatgatgagctctaatcttttttttaagtgcaggtgatattatctaacaatgatttcaagctgttaccctaacattggttaagacagtagagctaagtagagaacttggagacaagtcagaattgaatttatagaaataacacaggtaacagaacattaatatctggcttaggacagttctgttgaaagtgaaaaggaactgtggaggcagcattggcagaggttgaccagtactttgattcatgggcatgaaggatacagagctttcaaaagtgagtccaaacgcatcctgctggaatgacactgaaaatggggtatttccacctgaaaaaaagaggagatataggagaaagaacaggtttttggagacatgacggagagttaagttttgggcatgtgaatttggaagtgtgtgttagtctgtcagcaatctgtagctgcctagaagtctgctagaaatttatcttgaagtttaaaataaatatttagatttaataatattaagaaaacaataacaccaacaacaaaccctttgggcgtatttgtatcataatgtactgacacgttaaattcttacaataacttataaggtgggcactatgatgtattttgtcattttgctggtatttggcagtgatcatcacagcacaaacaagattaagagggaaattatagaaataaaagaattgaaagatagaatcctagggaatatgcagtggtggggggggcggtggtggcggtggtgagaatttgtcacagagatggaagaagcagaaatgagtattattatagcaaagggaatatgaaatttcatgccaaaaggaattgttagggatttcatatattggaaagagtttaaggtgtctgaagactgagggaaaaaatgcattgcatttaataatttgaggtcattgttgatcttcaggaaaatagtttcagctggagggcaggtgaagaagggggtgaaaactcagaagtgagaactagaggcattagtagtgcagccaacttttttaaaaaagtttgagatttaaaattagaaaaggggcagctactaatgtgggataacataattaagggaatgggtttgtgaaagagggaggcttgagcatatttgtgatctgagtcgaaggaggaggtggcagtgaagaataggagatgtgagaacgtgagtaaaaaaatgccattaaaggtaaatcctgggtcgagggggcagatattgaacagatcaagggcacaggtggagcaattggccttagaaaacctaatccataatcacttctttctttaagagaggaagaaagagatggtggataaggacaaagataaattttgtattgggatggagtagaaatagatcatgtctgaaaactttaatctcagtaaagtaggtcatcctctgtgaataagctgggggggcccggataaggtcatatctggagaggcaaagtcaaatttgtctttctagtaaaacttcaggctttatagttcaataattaaggattttgaaacacaagagactgttattaaatgcatgggaattacatgtatggtagaattggatcctttccactgaaacacttaaatacacttgaatctgagatttcaatcttctgtatttttttttttgaagttttgatttttagtgaaattctaaaaaccttggttaaggatgagaggcctatgaaccatatatgtgtgctaacattttaagatttgtttgtttattttatgggaagattttctcttcctgatgaacataaaaccaaagaaagtcacaggagtgaattccttcagccccaccctccaagttgttattaggctaacgctgaagggaaagatcactcaagatgcgctccttggggtaaattgatgtgatgaaaatttattgtcatgtggcacttcagggagcagcatctggcatatttgtccctgtttatggctctgacgttcatctgttattctatttttcttacatagattaactagtgttttatttccactgaatttttctgttattagataaaagtgaagcaaagctaagcaaaccaaaacaaaacataaaaccttttagtctgcacagtccaactcccagtgagtccaaatctatctctgatgttttatatcaatagtgccactgtgttatcactcctgagtgctgctgcttctgtggtccatgccataggcatttcttttcaaatcacatccttgattcagtaggttaatggggccagtgagcatggcactggttgataaacagagctaataagcaaagctagacattatcttttatgtgcaaacagattggaggtgggtttgtttgttaggttctcttattatctccggagagctctggcaggagaatatcattctccagttctctaatatacctcttctctgaattgaaattgagatctccgatcagcctaggtttgaaaaatctaataacggtttctgtacactgcttcacgctctatagccagccctcaaggagagaaagacataggtagaacagaaaattggtctgagtgcgaggtgcactgccagattggttgaagaataaacacttgatattctaagtttgtgtctcacactacaatatgcaagccaccaaaaaatgttggcattatgctaggagatatgtgaatatggcatgtgttcctggggtgccatataatttagattcaggtgtttggggaaagtttgaggtttactatttaattcacgtatttggagaaaatttgagatttacttttataggctattggaagccactatagagtaataggcgtaagagcattgcattgaaatctacatttagaaaggtttgcttgattttaacatataaacttgaatagcggaagagaagattagggggattggccattttagtgacctaggggtgaaggaataagggtatgaagaaataaaacatgtccatagcaatcattaaatcaatcagggccatccatcatgttgcagcatttggatagccagatgtatgcccttagagaggccttggtttccttatttggaaatgagaatgcttgagttggatcagagattcctaagtgtgttccacagtgtacttgtgctgtgaagcacactttgaaaaagaaagggctctataatcaagtcagtttcgtttcccatagtccatctgcatggtagagaggcctaacgctggttagtatactaagggatttgagaaggtctgaaggcaggacaactgtttaaatttcctgaacccaccctttcctaaactttgtgaacatatagtcttgtggagaataacacgtctagtgttaatctaatactggggttacattctaaattttaaggcaattatcagaaatgtaaaatccaacacagccagttatttttttctagcattctgtttcttttttgttgttgttgcatgtaagataatttatgaatgtgctttttgaagaatacgtgctctgtttttaaaaacttgaactgctctcaacctgacaagaggttcacttacatagggacacaagagaacaaagagtgatcaggggaaggcaaattcataattcagaacttgagtttactgtcttttataaatttattcatgaaatagtggtagaattagtaagtgaccacaaatttaaatcactaattaattctcattctttctgaactcttgcactctctcttctttttgcatttatatctgtgtatctttttctctccttgtctttgtgtatctatatgtctctgtctatgtctgtccctttgtcactctctctccttttctctctctgtcttcttttcccttccctctccttttttttttctctcacctaaagagtccatctgcaaatatagagatgaagtcccgtaaattaaatatgcatgtgccgtgactccctgtattaaccttttgtagaactgcgcttccctggaaactgtggactttagataatcccaagatcttttgcctttgatctgctctgctcactctcttctcctggcttttgtggattcagttctgcttttcaccttgaacttcactgcccctgcagtgccattcacgtgtaccccatcatttcaggacagaggcatggagaaggatgagagagtctgccttgtctcaagccctaagcaaataatctttgcatttctccatccctacttggaaggcatattcttaccatctgtggatcatataatgaatgacttttttgaaggaatgttcacatttcttatcttgcttgttatacacatcatttttcaaaccttggaacgatgagatggcatttcaagtaagggtggtcccacaaatcaaatgtagtgtgactttggtttcatttctttgttgaaacatctggtcttgtttaatgcacaacaagaaagaggtaggaaacatgtaaaagtccttgctgccctcagctctgattgctttctcttactgccattgtattatgaaactcactgcctcgagtagagaaaggaagttaattccacaataactacatttgccaagagtcacttgcatgtccatgggcatgaaggcactgtgtatattgcttttccaaattccagtctgggacttctgccttgaacaaggaaatttgaggcacaggtcactggagtctatggtgacatgatttatttgcaacagtaccatgttaaatgtcaccatattagggtggtgtggccacggctgccccttaagttttccagtcacaaaacagccctttttcccctcagaaatcctaaaactcccatataggaacaaaatcctacgccttatggtacacagacttcaggttgtcaatatttgttaaaaaggcatgatgcttactagaggacagcattggtctccagagctagccatgtgtgccaaacaggtgactggtttatagatggatagtatgcttaatataaatccaatcacttttacagttgctcttgaattccagcctcaagtcttggccttattccctcccagagtttagcagttgactttcggcaaaaggaaaattcgggatgagtggagagtagtcagcacaaattagatggattatcctttaacaaatacacagaaatctccttgctgttattgcttatcatcttctggttgcttgggcattggcaaattttctttcttggctttgtctactttgcagtactgtggtggtggaggtataggggtggtgatagtaatagaagtcataatgatgataggcaagattatatattcatcatactttatgcaactccctaatcttggtgtttaactcagtcttcatagcaaccttgtggtaaaaatcccatgatactgtatcctacaagtttagatgtaatgtagttggcagttggctccagaatccttgaacttatcagccagctagctaactttggtcatttcattaatctggcaataataccttctcatgtattatgggattgaatattttagattccatgaacaaaaacatgacagggctcactgtcctattagtatcctcattttacacattaggaaattgaagtctgacttacttaaaggtcactgctggaaggcagcaggcatgtagagtcagtgtggctccagaattcatgctttccatgactgtgatacaggctgaggtttataaagttatctatgggagggataaagctgttgcttaaaggttaagagaccatggctctgaccctggtttaattacaagtaccctgcatttcagcattacatcctgtttttatctcgggtgcacaggggtggagggaaccagatatggtgtgcacaaaacctactggggagctgaagccaagagctggtttgttaagtggccttgactttgatttaagtatttaaattgtgtcccaatttgggtcatatgaagtgaagcaaacctaacttcatgtatcaaacatgagtgatgtcttgtatcatgcttttctgaattagagttgctctttccttaagtgcctaaaaatgtcatgtgcctttgctcagtaaagtgatgccagtagctggcatgagatcagtaagaaatatgccaaaaatcactggagctttggggaacccaggattgggaaacattctaaatgactgtggccataaatatagagctccaaagtttagagcctgaagcttttatgcctaggagcatggcaatctctggtttcattatagtccttgctaaaatttaacttaaaaaagaaaacagataaattagacactattggcaccattgaaaaacaatctagcattatttatcaataaccttaacatgtttataagctttcatctaataacttcatatctggaatagtaagaaatatatacattcagagatgtttgtcgtagttttatttgtttcttcatcatttatttcatttaactacagaataatattctagttgaaaaaaacccaaaaatatgtaaagtaaaatgtaagattcgtattgcaaaagttcaaccacttttaacagtttggtatatacttcaaaacctcatcctcattatatttcttcctccccttctcatgtatacacacatacatacatgcattcatgtacacacatacatatatttgtgcacatgtatatacacatttagctacacatatatacaaaaatataatttccaagaaaactgtaaggctagggacattgttcagtaacttacttttttatcatattacgggcatttgcgtgtgtgagagagagcttgtggatctacataattgttttatcaactagatggtattctagagtcacgatgtactgttaaacattaaacttggtaaatactaagattgtttccaattttgataatacaatcatgctgcagtgaacacactagttgctatattttggtacatgtataggggcatgtccatgaatcaaattttaggagtagaattgtagagtcgaaaggacacttaaatttttatagatcaggctaaatgcatctctaccctaccactatcactgacacagctctactgattcactttcccacaaacaacatatgagagtccttcaggttttgttattgttctttttctagcttcttgagataaatgctgtatcttttatgttttatgatgaatttactttagactgtaaattttccttcaaatgctctgttggctacctcttattggttttgataggtattaccggggtgatattaagaatatctaagaaccagtaaaaaataaaaaaatatttcaggaaagaggccatcactgcctagtccagccataaacaactggtatggctgtcctggtatgaatgtgccagatatcagacatgtgactctcactggaattcacttcttctagcctatcacccaaccaaactctacaatatgatattttctaaatatgtcaaatatgcattgcttatatgactttgatctgactttttgtttgttttgtttcttctgggattgctattatcaatgaatctgttcattaaaattcttactcataattgaaagttcagcttaaatgatacctccctagcaaagataacactcttctatgaaaaattttgtcatttggtttgaacttcatatggtagttactattatcatcatcagggatgagtgaactttcttgtaaaggaccagatagtaaatattttctgcttgctatgtatacactttccactgtgctcactctgctctatgtaacatgaaagcaagcttagtgatacctaaacaaatgagtttaggtgggtctgtcctgattaaattataaattataattaaattattaaattaattatattacaaaaacagttgtccaggctccgggccatactttactaattttcatattttgagctatactatttaatagctattataaacttctctaatcttctattccggactatatacttcttggaaatgaggcttgtgtaagtggtgatgtggcttaacctttaattcctacgcactcaagagacatttgttggataagtgaaaaatgttaacaccgttgttattcacctgtagaaattttagtgattcttaatataaacaatgaatactggagatattgacataccagcataaaatttttctgaaactctaatttgatgcccaatttgtatgtagattattcccttgcttgtgtgctgggtttagtttattctttgagattcattcttttgtcaaaacgtttttagggataaaaggagtgtagtaaaaactcagtcaaatatttgaaaaagccttaagtcaaaatatgatagatctaaaaggaagcctattcatattgcgtactgtgacatttattcttgtttaggaagctttatgtgggttgttaatttgtttttggcttaggtaaaccaagctatgatagagttgagcaatgatatattcagaaaaccaacataactggtgaaagaatttttttatccttatattttttctatgtccagataggatattctttaggagacttacagtagcatattgagttttgtttggtatttctctctggttttcggtgttgcttgaacctaaaagctttaaataatctgtagatgaaaatctcacctattctatcattattgcgacaacagaaggaatgtgtaatgaattcacagccattcagaagccgcagaggcaaaacacatataagctgttattaattggatggaaaagacaagaattaataaacacccataatatacacacacagaaatacataaaaataaaggaaacgctctgtaaataattaattaatttaaaaattaaaaaatgtgaaagaaattgtgtatttacatagtgaagatttgagaagaaataattctacctattgatcataaaaggtcaaaaaatacagtaatgtcacatcatttaaactgtatagttcatcttccagtagtagcaggagtttgttttactcatctttagttttcttcttacaagactacactcgtttcacccactcatggaaagaacagcttgtcttatcaccctccagtggaaatgagttatgagccttttatctggagtttacaggacagctttaacctctttatagttgaacttcagtgatgaatgcaatcttattttatcttagttaatttttttcccaagaattccttttcctgttctgatttgtaggtacatacaagataataataggaaagatcaaattaccctatttgggatcatgttaaacacttttctattgtcctgcaagtcttcagtattaatttcctgtttctttttctgttcatatcaatctaattagaaaaagcaggcatttgtaacattcataatattctggtgtcttcaccgtatttcaaagaaaagcttgtattttatgcatcttaaaatatttttgtgggctaagttggtttacttcttcttaggtttataaactaggctgccaagaattttgcaaactagaaatgtagtgactgaggtaacttgggtgtcagttgcaagacaaaatgatcattcacaaagatgcagaagccctaacctgggttctgtgagcaatagcaggaagagtcagatgtactgcgtaagtcaaatggatggccttatttggtatctggctaatatatcactctggctaatatatcacccgcagaatgcaaggtccttactgttttaactcatcaaacacaagaggtccttcccatggaacatatcctcccctggcactgattagcaattatttccgaatgattacctttgaatgattggacagagtttatgatttgccaaaagtcacaaccaatgtaggtcatcatggattagcttctttcctttgacgtttaattaatttattcacacattcatcatgtatcttgtgccaactgtgggccaggtattgtgctatgtgctagggatgccaacttgaatgagacaagatctggaaccttgagagacttaagtaagaaatatgcaaatccatgattacattacaattttattagtgctataatggaagcatgactaggatactaggggggcataaagggatcaaaatcagattcagggaaaataccctagaggaaacaatatttatactgaattttgaagaacaagtgggatttcagttagagagcattgagacagcattgtagcatatatcaaagagatataaaacaggaccaggtatttaagtaatgacaaatacttcagcgtggcttcagcaatagaagctaagggatataagtggtagatgttgaagctaaggatccagccagagatcagatcacaaaagatgaagatgataaactaggaagtatagtttgggacaaagtgacataaggaaaggattcacctttctcatttaatagcattccagcaccatgccaattccgtgtcacacaaccacaaagctcttcccttgcctcgttcagtgcatttctatggggtttgggatatgagcttaaaagtaaaggcaggactcatttctctaaatggaattcacataccaactgctaagagaatctattcttctttaacttatttcagttgtatctcttctgttaagctggggacctactcagcctgccaccttcttgtgagcaacttcccctttatctgtactggtttgactgtatagaaaaagatgcagaaatgccgtaagggaggcataagcgaaaataagaaaaagccagcaactactgtgggccaggcactgtgctggatcatttacacggtacctcatttaatcctcaccatgtctatagatattattctcatctccattttacagataagtaaaataagtgtcttgcttaaaattgcacagtaaatatgaaatttggatttttaactttagttgatctgtttctagaaaaccattatttgcatattctaatacttcctagtctgggcagtattctcccagatctaagtccaaagtacttagaaaagtaattaaatctgatacctagacttgtttctattatattcaaattgttcatgtcagcacatgtcaaagctcttaaggacataggaagcaccctttccccttaaaacattgccttcttgaactttctgtgctaatattctggcagacacatggtagaaagaatctgttttgagattctggagccgggttttaaacctggtgctgaccataacaatgtttgagatcagactcgagtcagttaagctctcagggatttagtctctgccatgtaaaaggaggcaactgacttacctcatcaagtccttttcctctaagtacctagatttttgttttcacaggtgagacattaaatgggttatttagatcacctttgcacaaattgctagctttgttactgatggataacaagaagttaatttcactctcagagtagactacggtcagctgcaaatatgaaggaacggaggttctacaaaataggagaactttctctgagacctctgaaaggttcaggctgcctgtttttattgtaactcttaaatatcaaactccttttaaatgctctaaaggaatttcatgaaaaatgttttctccaaaggtgaataaaggagccattgactgagtaaaaaaataaatacatgaataaagaataaaagctggatcatcttccttcctggaaacattctatggcatattaatggagaaattcatactatcacagagaaaaatttacaaacatgacatatgtaacttagagatgtttaatcccgagaaaaacagtcaaagagaattttattcacttacagaggaatatttttaaaggaaggatttgctagcagattgaatttctattttatgttagttatttattagcaaactcataactttgctattcaggcagcttggagtcataagagatgtattataaaaaagctattatttttagttattaagaatttgaataaataactgtggcccttttttgaagtggagggctattaagaggtacagaaatgcagataaaaatactccttaatagaaaggtcagttaaatataatgtgtcatatttaaaagaataaactttgaagtcagagaggacaaaatatgagccatggctccagtactctgtttttaagatttgtgaatgtaaaaaaaaaaaaagtttggggaaaatctttaaactttattcctgtgtcatgcaaaacagcgagttttgaggaatacattgagttaagatatcatatacttagccaatgaacgtaccaaatgacccatacatcacctgctcagttcatagggcaggaaccttaagatagaatctcatagaactctttctttcacttataacctgaataacctatacataattaccttgctttaagtgttttattgtactagacatgggttttccaaacttttatgatatattagtccctttcattgaaatatgtaatcccagcaacttccttagaaatgaaaaaaactaatcattttgacattattacctggtgaaaaataaaatacgacacatttttactgttttccatttaacaaatgttgtgctctattcagttacttcaaagttaagtttgtaagcaacttataaaatatctgaaaatagaacaataatttgaacccacaaagatatcagattgcaatgcatattatgtggctaaattctataattttcctgagttgtttctaaaggatgagataagaaagaaactcatgttgtgagctttctccacttgttatattttgcttacatgaagactcaaatatgtacatacgtagtttttcctcttgcaattccctgtgaaatactagggtcattttaatgttctgtgtaagatgaacaccaattttattctcaatagcagtgttccatatacttcttgcattttaacaagagctccttcatcaatccaaataataaattacaagaccaaaaatgaaagcaatttgtacatctgtgaaggtcaaagccaccaagctggctggagatattcagctgagggcggtaactactgaagtcctgagttatgggcacactcgtcctctctgagtgctgtgcatgctcactcagtaaaaactaagcggctctaaatggtttccttttaagaagaaaaagcatgtttagtgtgttatttaattcaatgatttttcaaaattagatattataatggatcccaatcatgcccttaataatgagactgtacaagaatacgtgataaaattgtagaaaaagaaataacaatggttttgccaggcactgagcttagggctatatacagttttctaaaggatgctccatctatgaagggctcttcctctcttttatttttttttcatttccgtccttcccatttgttttctttcttcattttcttcttttctaccgtctggcttatttgagtcaaccaacatttactgtatccccatgaaaagccagacatcataggaggaactacggatacgagaaattaaggagttcataatctagtaaaaatgttgtctgtgttttttttgtgtttgtttttaatttatccggagtttgtgtttatttacctatccatacatgaatttataatcactttggatgccttaaaatacaataatattctggggcctatatcacctaatgtaatcctccacatgctgtagacatgattaaaatcctcatcctctaacattcaaatagatctggtgaaaataaagtgtacattttatgagttaaaaatcataaaatcttagtcctgctagtcttgattacagttcttttaaagtacctagtccagatcaagtcagttgccatgctaattagttttcacatacgaaaaaaaaaaatggccatactccagacactggtctttctatttcaggaaagatggcatataagaaaacctcactatatgcaaaggatttgtggatggttccttggagttaattttcatgggctttagaaggtatttaaacctcaagacaaggagagggtttataaatgattgacagaagctctttagctactcaagtccaagagggtagcacctcttagccgttcaatgaatagtatggagaattcgaagggctgcttagaactctagggcagcctattttttgaagattatgcttttgacctttcttgctagaagtcatccatccatctaataagtgttatttaagggcatacagtgtgccaagaacgcaacttggcatcaccatggagaccataaaattctagtctcatcctctcatccatcacaaccaagtagaagttggtgctgttaatgtcaagagcaaatcaagaagtcaagaaagactgaagctcagacacattgtcactggtgtaatctccacctttgaaggtgctgctctgatatcaaattttatgtacagagacaaacacatacacagttgacaaagtaacagacataaattatttttatgttttatatgttattttttgaagtaacatcaggtatgtactttagcttattttttcacacaaagttgatttttttgggtaataacaatagaatttatactagttgcagaattatctacaaccaccatagtaaagaaacaaagccgtaaactaggtcgtattattactgttatcttttgaatttttggacagagctgatttaataatttggcaaacttgtaactagggtaactagaaaatgctgaaatttaaatctatgttatttatattattttgatctttatatggcctaaaaatgcaggtttaactccagcacacatagtaaaattaacagtagaaagaaacaaacatcagaagccatatgtaatatgtctgtggtgctcttgacacccctctgtcttctcttctgaaatgtgtattccttctgatattggacacatacagttacacacacacatacacacacacacacacacacacacacacacacacaccccttggactgaattctagatgcaattttaaaaatcaataatttagtatctcttcatataattcacaccccttcttatttcccccatgatttttatttaagcttgtacgcaatttttggcatgaactaagctttttaagactttatgccactgtagggatttttggaaaacactgataaagccaataaaataacacaccgattcagatattacccttgttcaaacagggctctcaaatgggtcctattttcttggatttgcccactctgaaaaaaaaaaaaaaattcactgcaagctaaattactttctttaacatacctagattttttttattttgtttttatttttaactctggactttattaaaaggacaaaggaattcactggagtgggaataacacagattttactgtgcaatgaacttaaatgcacttctataaagtaagtcatgaacactgacttcaacctttcattttcctcaggaaggacccagttagaaccagcagtcactgtggctgagggaagaggcacagtattctggtctggtctaggttcttctttcctttttcagtttcttttttggttcctttctgtttgtactgctcttgtgagcttcttattgttcaagcctcatagctatttatggattatgcacagtttgggctaatatgattaacatttgcctcaagagccaggtcttctcatgtaattggttctctttcaaaacacgtggcctccgcctggatgactggcttgctacgtaacctggaacggccatgtcctgggtctttctgtgctgcatgtttggccgtggaatttatttcttctgtcctgctggagtgggtaggattgtttgaacaggaagagtcacttccttgttatgctctcccagcattgtagagctccaagatgtttcccctgtgcccttccattaagcccttacaatctcctgcactaaagtttaatcacttccctcctaatatcctaaagaagacaagagctttctctcctaattctttccttctctcctttttctttttctctttccttctttctctttgcttacctagtattctttccagcctgcctgcctatctgccttttcttctctccttcctctcctcttcctttactctcattattccctttgttttccttttccccactgttatttttttttctaatttcatgtcatttctgttatgaaaactagatcccagttaatggagctttatcgtatttgcacacagatgaaagaatacatgcatataataatgaattgctgcattctttgtaacaagagaatattggaaacaacttgaatgtccattaataggggacaaattgaataaactatggcatgtctgtaaaacagaactctctgtaactgtagaaaagaatcaggaaacactctatgtattaagttgtaagtatctccaaaatattttgtgaagtgaaaaaaagacatagtgcagaacatttgtattttatatttcgtttgtgaaaaaaggcggtggtgggaaataagattatattttacattttattgctcttagtaaacaccaaaaaatttgtgtaggaaactattcctgggtgtcaaggatagatgggctgaggaatagtagaaagggagattttatcgttataccgttttgtatttattaactttcaaaagtgtgttaatatattatccatccaaaaagtgaaatataataatgtaaacctgggaagccaatgtaagattcagttgaaagaaaactatcccattaaatgcatatatatatatatgtgtgtgtgtgtatgtatgtatatacatgtgtgtatatatgtgtgtatgtatatatatacatgtgtgtatgtatatatatacgtgtgtgtatatatatgtgtgtatatatgtatgtatatatatacacatacacacacacacacacacatacacacacatatgtataaatttgacatgactggtatagttatccaaactcacaggtgttcttctagaatattagctatctatggcttaaattatgtaaaattgtcattttttactaaaaaaccatttcaaatattggcaatttcatactattggcctaatctttccttgtcttaagttgaggcatcaaaaatctatcatcaggttgcctgggctattactctctttaacttcattcttctcctgtgctatagaaacttttggagtcatatttcattaatttccccaggtcacctggataggactatgaagtgtggcaatcctgaatcacctttccatccttgctttattaactttacacttgactgtagattaaactgtcataatctaccactgagattatggtgtttttttcctaagaagtcattctgaatctcaggctttccttgcaggtctaatgtcttcattgccaccaaatttatctttctacaatgcagtttgactcctgtttctttttactaagtgcatcccatgtcttctcactggctacataatatatatggactaaactccttggaaagcatgcaattcatcctcattcttacctccacccactgatctttccataaactctctaaacctgttctttccccaaattatgatccccaataagtctccatggctttgctaattactttctgtttattaaaatgagcttctccaccttctatgtcttgcaagcctcttattaccatttaaaggttttacacaaataagtgttctctctgtagttctgattcccaactatccacaattaatctcttgcttatttatgtttccatggtcctatgtaattacccctattataaatctagtcattaggacctattccagatatttgtttatgtggctacctaccttcctcactaccttctgagtgattggcagcacagatgaaggtcttggttatccttgtattccctcgtactgagctcagtgtttggtatagagttttgtgattagtaaatattggtttattgagtaatgcttcagtcttactactggcatcctttttttttttttttcgagacagagtctcgctgtgtcgccaggctggagtgcagtggcgcaatctcacctcactgcaacctccacctcctgggttccagcgattctcctgcctcagtctcacaagtagctgggactacagacgtgcaccaccacgcccagctaattttttgtatttttagcagagacggggtttcaccgtgttggccaggatggtctcgatctcctgacctcatgatctgcccgcactggcctcccaaagtgctgggattacaggcgtgagccaccacacccggcctagaatccttttgtatatggaaggaagtattttaaaaatcctttttaaaaaaggtaggagactaatgttaaggaaggttttgggagtggggaaagaaatgcctttacattaaggacatgaaaattgaaagtacaaagcagtctctaatttgttcattatttgccataaggacatgatttagttttgaatgtattccaccaggttctctttatctcctttgcttcatattagtgtttattttgatgatgattaaggcaatatgctactaagaattgtgctgtctttttgtaaattatgcctgaaaaaatcgtgattgttcctgttgctttgaagtcttatgtttatatttaattgtaaaagttaaggctacctctatgtgatagacagagtgttctccaaaaaatgcccgcaaatttggagtggaggataaatgacagttttctcttcctacttctcccttcctccttttcctcctccttctgttacttaatattatcactattatcattattttcttctaatctggaaatataatagcttaatagcctagtctagctgagttggacttgtgtatttgttgaaaatattaagttataactttggagtaaatactcatcataaaatgagaatgatttgatggtgtgtgttcttgtgtattgcacagacacattactgagtggcacatagagttgcagtgagttttactgtaagggagtattttagccatcatgtcttccaaggatcgcatgccctgtttcctaggtcctaataaaagcttgtatttatatgtaactcactattgccatttcagttcatcaagattaacaccaaggagctattatcgatcacgtcagagtgaggcaggtagaatgctagaattttttgaggatgaaataaagtgatcttagtctctggcatcttagttgttgggtgccttcctttttcttttatcagtaaatgattgttatctatgaccaaagaaagaagagaaattcgcattatttagcattttgcccacttaggtggcacttactctgatttagtctattataacatcattatgtcttgctaatggcaccatgcagttcacttccttcaactgtttgcagagtgcctctccatttaaacaacgtggcacgtttaaatagtttactagtactataacattcttggcttattgtacattagattttaaaatttagaaaattttctattgagcacaagaatatataatggtgagcatgactttaaatactgaaatgaaaagtctgtgagaacaattatctgtttcgttatgtgttagaagtggtagatatgttttctgtaaatgtgaataaactgaaatgaaattttaaagcttgtggaatgaaacgacaaaaaggacattggtattacacagtttctttcaattccaccatccctaccacccacccaacccttcatcccagaattagtgttggtctgttgctttccacggttccatgaaatagttagatgatttaataagaactttggaatatgtcctcttttccctcaacctccaggtaaatttattggtagttaatgttgctagtcttttcatggcctagaaaattgttctctcttttcttcacttagttaacttttatttttccttctaatgagagctcaggtcttccttcctatgcaaggcttccctgacctccattgggttagatctctcataaaggtgctcagagcactgcttacttggcaaaccttcaaattcacatttgtttacgtgtttatttttattagtcttccttccctattaatccaaaagccctataaagctgagggcagtcttcaactccctattggattattaattccaagtataatgttttgcacatactagtcactgagtaaatatttttgaaacatgaaagagtgttcagatgtgaaaacactcatttttggctatagaatataatttggggtatctccatcaaatgcatacctagttatgattttattaattttctgcaatttaaatcagtattgtttctttactccgaaatgtaaattaaggttcagtgtttaatgccactataccgggaaaatatatgtttttggcttttaattccataacatgtattttttgcccctgaacttcaattaaatgttctccagttggttttttgtgttggggtggggcagggggtttgtaaggtaacccttttggttttagagcataactgcatccatacttttataacccatttacaagtgttgtaagtatatgaaccttaaaatgtatatacaattcttcaaagctcatgtgtaattaaaatctggaagggcaggtggttgagaggttctagtaatttattgtgttactctaagataagaatcaaaaatttaaaaatcacaggagagtctatagttagcgtgtatccaattgatatacaataaaagccacaggaagcatttattaaaagactcataatgaaaccaaaagaaataatccattaggagttaactcgcagaatatcatatagaaaactgaataagctttagagaaatgtcttattctttgactcttctttgggcagaaggtactacagaatattaactagacagattttcatgattgcctattcaaagaaaatgaagtattttgatgtgccatgcattgagtcaagcttaatgcatatttaagcacagttctagcatctgagtggtaaactggtcttttactcctaatggaatttttgttcctgacatggaaaaaatcatgtgaaaaatttttatagattatatatattatatgtatattttataaatcatgtgaaaaattttaatatatattaactatataatacatattaatataactatataattaatatatatattaatataactatagaattaatatatatattaatataacttttgttatattcacaagatactttaaaatcttattcatttctccaacttctagaacaatttttcctgggcaactattcaaatctttgtgaaatatacatcttactctatgacatcactagggactatagccagaatagaccaggcattcagagctctatgtctgtaccacatagacatcagacagtgtttggacaaaacagatctaacacttgcaactattgctaatttttgacccctaaatacctaagtttgaatataccactgtgtgggattgcggtctctatttctccacactacaaaaatctgccttcctggattcccatggtcctgttttcagagtgggtgtttgtttgtaggtgctagcagtatgtttgtaattccagttaggtttgtcactcaatagcttctgcattcagccatctctgtactggatacactttggaagaagtaatagttaataagtaatattttaaactaaactactttatctaatttatgaaatcatttgggctggaagagccctacagtgaaatacatagctcatccccttttctggaatagcgggatagcttattattgtctataaaaaatccattctgggtgggtatctattctcagccttcattatctacagtgatagcaattccacagcctcccttggcagccctccctattgctgaactagccttgcttattaatcctgtaataataccttatgttctctaaatattgaagcagtgcttaagtttcccctgctaactcattcctccctgctcaccctgtgaaatgcttctagagggggaataattatataagcacacagcaccaaatgatgtgttgtgcagccttgtcctaaggcattctgcaaagggcttgttaggatggacgttgtcagtccatagaaaattaagctattaaatctgcagcacccggatggtgattgaattgcttgtgccactggaataaagttgctttgcagacatatgaatttcacagctagtagtgtccttcccttcctgcatgctctaattgtatttttatattaatgcactgatttaggggctatgttggcatatttgtgctggtgctgggacaagagcattggctggacatttcctagagggtgcagtccacaaattttcccagaaaccgaattgattatgctgatgggataagcctgtcctctcccattttcaaccagtctgtgcgctgcctggtgttggcactcttacccatatctctctgaatacctttttactatttctgcactcccttcatctgcttctgggtgtttgacttgtgcaggctagcactagtgactttcttcagaggactgccttaggacagctggagacctgaggtacctgggagttccacgtcctccctggtgtttatgagagcccagctccctttccttaagttaagacgaactccaatatgtaacttacagcctgtagtttcccagtaggaccaaactaaagctatcctttgttgaatttcacttgaaaaagtactcttgcttgccttatttcccttctctgtcttgtttccccatgatttccttcccaattatccggggagcacttctttaataaattttacccacaaatcctcatctcagaccttgcttccaggaaaccagacttgagacatcattcctttttctgtgatccatgtagaatgttatagtcagacttctcagcctcgcgtggctgaccagatttctatgactgtttttctctcatggtacacacatttgattctgtccatggaaatcacaaggtttttttccagattcacaggggcttgtccataatggtgatttgagttttctgaaataacaaaacttactcaaacccaggatagctcctttttttttttttttttttttttttccgtttgcttttctcaagtgcaacatctctcctgtgctgtttctgaaactggcttgttcatctattagagcacaggccacatactatgtccaattatagaatttgtctctcaaactggactgtgaactctttgggggagtatctggtcatcagaatccctgacaagcaactcacatggtgtcttccactccacagctcctccgtagttggttgctgccttctactgatgaaaggactcaagtatacctaggtttgtgataacagtctttgtgactgcttcattttgattagcctcttctgtttcagtttattcagcccagctctgaaaacactgactgatttatctcttttaaatttaatacattttctatccccaatccagtgaatatcggaatatcaggataatcaagaacaaatggcaagttaggaagtgatgcatttggagacaaaacaacaagaaacagtcatgaacattctcttgcctccttttgttttttttcctaaggtctttattcacaaatgaaatgttattgttttttcagttctctctctcttgctctcactctgtgtcatcctcaaatatgttagaaatattaactgagaaacatgctttatctaagaaatgagtatcttttcaagaatgaatgctgacctgaatataatgtggaattaccctgggcaccaaagacagcttgcctgggcatgattgttccggaagctattactgaaatttggaacagcaccctcaatgtggtgtcaatgcctccttcagttctgaagttttgaaataaatactcgaaacatccagttatacaccctctttccaagagtgtttgcacatatttggtgctcctcaagtttttcaaattaatgttgatgaaataaaagagtgatcagatgaatctggcactatatttcttgcaaggacaagaagctatttttcagaatcttgccccaaatatataattgataacattggaaaataaataaggaaattttacttctgttgcatgttcctccaatcattagtagactgactttgaaatgagaattcaaagtataattaaataatggcattattctgggatgacttcataccattgttgtagactagcatatgattttactagttattattttctcagctagtctattaaatatagaaaaatttcagtaacagaaaatattgaaaaattttagaaacaggaaaatctaaccttttacctagtaaccatgtactttttttcattaggattcctcttaaatttgtatatgtgtgtatataatctgtatgtatagtaatatttgcatatgttacttttatatcagagagaaattaagggaaaaggttctggcaaactctaaaactatatttagtccatctttgaatcaattgtgtatttctttcatggcataatcctacctggtagattatttcctttattcccagaggtgaactagtcagtgatcatttgcatccagtgccctctcaagggtttatgcccaattagaaagcagtagcactataatgtagcatcagcacgtataacattcagtgctgagacggtggcttaacaattcatggggcttgataaaaagtataatttaaaaaaaattccactgcattaacccattcttctttaactctaagaccagactgagggaaaagtaaaacagaacaaaactgctttcaacctacagggcagtttaaattttaaatttatagtgaagctacaattaaggtgatttagtatagtccctattctcagttaacaacttccctttggaactagggtgggtaagtcttgaaatattcaataaagagcgatccatgtgactaagttgagtcgctgtgtctccgttgcagcagtgcaatgaagcctccatctggaatgaattcagcatctttaacaagtaagaacagggatgcaaagttgtctttgttttcttagtaggattaggctatgatttttgatatgacagacagttctttataggataccctgaaaatcctatttagtatttgtttatgcaaagaaatttcttgttcagtggagcaagagtcaagaaaatatagtaagacagaatggttaagtgctcagtacttccataattagagagatctagacttgcttgtatctagcgttatgaccataggcaaagctgtacaattcatacaatttctatgttttattttccacatctgtacagcgggactatactagagagttgatgtgagagtgaaaatttaaaaattatgtctaaagggcttattagcttagtacccaacaactagcaaatgtttcttaaaaatggtgcctgtgaacaataacagtaaagtcatagttgttgcattagccttttgcttttattatacatcattactatttaagcttttcacagttccgtttgcaatacacatataacttagtcctgtaagttcattccaagattgagagttaagatgtctttacaaatatgaaaaaaatgaagaggttagtttgcttaaattacttgctattcctaattttgatcaagtgttttcttaatattttgcattatttagtagctaatttttcccatcctaaaagtatgtttgtaaatactctcgtgtctctatatttttaagaaacagtgttctgtttttatattaagcttaatagtttaatttttttttgcagctgtgaggcagcagatgataaatcaaaaactaatattttcaactatctcaaaagataaaagtctgacacactaaatatggactaaatgaggcttatggatgatttattctaattagatataaggtaaataaatgctcctgcagttgtgaattttattaaagtcaggacatgtcgttgttcaggctttcctgcattgcgctttaaagaatcatttgaaaatattttgggtctgctgttgctgagacaatatggcttggcagtgtattggtaacttaataagctcaccacatttgtcatgcagaaactgttctttatatgcaaagctgtcagacagattgagtgtataattcttcttcgcatgaaataatatgataaaactccagtatcaaattgaatgctgtactagcgtttggaatctttcatgcataggttggaattgttttacaatggaagcattgtttgatgacaaatactctttttgtaacattcatcagttatgttttaatagcaggcattttcctcctgactataggtctgccttttttgctgttaacatactggaaaatgaagcctgcttctcagttatgtttgacattttttttttaatggttaactgctacaattagactgcactgtcagtgttgtagatgtttttgttcttcctacaaaagactatcctattggattttgccagttttatgatagagcaaacattatttactccttcctggttttgattcaatctccaatgataatgcgtactgatacaatattttaagtctcacttcatcacagaagagaattgcctggtatgtgcccatataatgcctgttggtgcaagcagtgagataataaattagcagaaattatgcatatagtccacgtggcacattctagaaggttaagcatttattttggtccgtggcagatatgctcaaagaactcccctgccatgtcaatttcaagggtctaaaagggaaagaaattgctacaaatacatacacagcaaatgtgcttaaagcagctctttgccaagcaagttcctgttacagagtggcctggtgccaaagctcttctaagcactctactgctacttaatgtatttggtatgtgggagaaactcgtaactctgggactgcccagtgtacggcgtctgtcacgtctgaagtgtgagcattccaaaggctcacagccacccagctcagaactcagcggggaagacaggaacaggggtcagcctgaatagaaagagactaaaagatacatttgtgaaatttgtgaagatatctttttctctcttccctccttcctttttcctcccttcctcttaattcctcacttcctgcctccctccctctttttcattttgttttttattctgttttgtttttgaggggtactctgttctaaatgtattcaaatgattataaaatattcatggcaattcttaggactgggcctggcgtaccttaatttttcaactgatcagcctttccggtttttcttaacaaaggaaaaccagatcttttgcatcccataacttcgtagcaaagcctccatctggaatgaattcggcatctttaacaaatatgtgttctctattcaaaaactatctaaaaatagttctcaaacaagtaagaaaaaatattttgacattttcttcatgttttgggtggtaagcacagtttgaaacaggctttctgttaattttcataggcttaggagtggatgtacttttgtgtgcatgtacaacatattttgctcaaggatgctttctgatccaaactataccatggcagttgtgtttttttgcaaggcacaattcttaacatgagtcagcttttccatcaaactcaattacaagtattcaaagtaaaatgctcaatcaagatctactgacacatgccaatattgattttgcttacgtaattttagatgaaaaaaaaaaccataatcaacctgtgagacggtgtttgtggcctcaaccccaaagatactgatggcaatgactttattgcggaacgaaaggattactttataggaaagctgggcccctgtaagaacagtatcacttcctataatttattaatcagctaccatgtcttaggcatcatgaaatgaaatatacatatgtgaatattcttatacagagatatatcttgtcatttaatcctaaaaagatattattagtcattctataatgaaaaaactgaagcttgcaaagttgagcaaattgtcaaaggtaaattggttaaacattccaacccaggcctgacactgcctgctttgccatcatgttttccttttggaaagacaaaaaagacaatatgttgatttttgggggtcaaattcatatttaaacaattacaaataaaattaagtcaaattccatgtaccttctcctatttcctagacttctaatactctttggtcttttaaagtatacagttttagcaaatctgaaacggttttttaaaatgctctaattataatttcattgtaacatgcttaaaattctaaaattaactctagagtatttatatacatataatatggttaattattcttaacccccacagcttatcccttttgttattttttaaagatgatttcactttaaagttggtgctcatttatggaaatatttgtaaactaatgaatacattgctatcactggagtaatttctagcacccaacataatgtccttgggatatttgatacaaaatgttaaaaaattatccctattgatcaaaattatttttctatatgttaccatataggtactaaaatagtacctatatggccctagtaatctgtaagatttaggaatatatggctggatgcagtggctcaagcctataatcccagcactttgggatccaggggtgggaggattgcttgaggccaggagttggcgactagcctagacaacataatgagaccccatctctacaaaaaattaaaaaattagctggtcatggtggcatgagccttttagttctagctacttgggtggctgaggctgaggcaagaggattgcttgagaccaggaggttgagggaactgtgggctatgatcatgctgctgcaacccaggctgggtgacagagtgagaacctgtgtctaattttaaaaaaagactcaggaataggaatacactagggaaggttatgttttagatgttctaatgtgatatgaagctgcacagaatcaaagactaatgtaataatacaaccatctgataaagcacaaataaaaaacaaccttacaatactacttgtctctacaaacactgtgtttccagtaaaacagttaggggacatgtttgataagcctgatctttctaaattacatttgtggtgcaaaatgatttctggtaattataatttaggaaaaagcaggtcacttggaaaacaactctgttgactaccttataaccttggctagaatggtataaatggaagggactcatctattttgacctctccatttttgagatgggaaaattgaggctcaacagtatcaagtgacagaaagcctcaagacctaaggccagttaaagatgtagggatctgggaacaaaatatgcatgccatgatctgtgctgtttcttctgtgttgtgattgggtctctttaagctttttttaaaaacgaagctccacatctattttgtctttgatttgcattcattttcatatgccagttataaagtatcaattctagcatcttaaatatcacaaatgaggcttagaatgtatttaatacttcatctatgagttatataaaagcaaataaaatgtgtcataatttacagattggtgtcaactgaagcacaaaaaaagagtaattggtttgccttcagcccaacaatatggtctttgtaaactacagaatagaatctctcctgtaaaggtttagaatagtagttctcaaagtgtggtccctggacaagaagttttagctccatctgggaacttgtaagaaatgcaaattctcagatttctgctcagacttactgaatcagaaacacagtgggtggagtccagcaatctgtatgtgaaaagctcttcagataattttgataaatgctaatgtgtgagttactggtctactggtctagattatgctgtctaggatttctcctctcctctcctcctcctctcctctcctctcctcctcctctcctctcctctcctctcttctcccttccttcctcatccttattccataaataatttgttattattattattatataaataatttattacttttgcatgagtaatgtctcttaagaaccaccgtatcagctattactccagacttctgatacggtttagaacaaattttgtcaccatgttatggttgagtggaacagcatcatcaattttgatatgattcttggcaggtgttttccttgctaatttcaaatgattgcttcacctgttagtctctgccactcttgctactaattgtcatctttgctagcagacctcactcagaggtcagccactgtaagccaggagactccaggatcctctaactcttgttggcctctcacccccacctgtggtatcccctgacagggctgtggaaaggatgagttagtagaggaagcctgacttctctagggcccatgccgtaattcttctggagataagtagggaagcctcattcttcaagctctaggccccaatcctgttttcaccgacactaaattcacttcattatccttgtctgcctgaagacagaccaagacaaatggcatttacaaatgaaaatcttgggggcgggagcattaaagtgtgcctaataagaaatcagttgttctctcagtgtttcgtgtgctggtctgagcaccaggaagtggctgcaggtcctcgcagatgtggaatttctgaactgaatttctgatattttgttgtccaaaaatagtcggacagtactatttgcagtcattaatcatgattattaagcaaaggatcaggagagctttacagctgttatttaactcctaatgacactgcagagtgattagatctcaggtagactttaacttttttttttttttaagaagaaagaatgatgtggtcagaacagtcatccctttttagtgaggggaatagcggtattaaataagcagttgcctcacaagtacaattcctggagttctggcaagaactgctatctaaaataatatgttattcacaagtctcagaagttatgttaccctttaatagagtaaaaaatttgaatgcattagtggaagatttcaaggataatagaaatgccttgaaaagagacgaactattgccttaaagtcacaagatggcacagagtatgttgtctgactatgcatcagtgtagggtgagcagcacattttgttgcctgcaggtaggaggaaaatgagagaagtagcatcctttgcacctaaggagatggctgccaagggaaaacgttgtgcaaaaacaccaagttggggccagacacaaacattgccttgcatttttgctgaggacaggtctctactgatagatatcttctattaaagcacaatcctagatcaaagtaatgtcaagcacatataggaagatattttgatagagtttgtctgtcttctcccaggactggctacataatttgtggagcctagttcaaaatgataatatgaggcttctggttaaaacaacaacaacaaaaataagtatttcagaggtggtagcaaagaattaaactaagaatggtgtccctctaagtgaagagctctgtgtaccagtttcatgcccatgaagctggccttgtcttcctttagcacatttactttttctgttttttatttggccaatggacaccgccattggggtgttatcttatgacagaatgcaattttgcaaagtctaattttaaaattgtgtattaaaagttttccctggacttaatgaaggactttgaataccctctctagttgccaaataaattgagtttaatgaatctcaaaatcatatgtgttcatcatattctttatagcgtcagttccaagtttgtactagagagatttgacaaaatgccacatcttttcttctgttcaaaagtcaaatatccttagaagagaggaataccttttgcctgaatctattatagcacaagcaaagctggttttactgtaaaatcccctaaaaccaattctactttttaggagatgtcaaatatcttggttttctctatgtgcttcgctttttcagtttgacaagataattagatcatagtatttcagtgacatagcagaaatggtagcaaataaagtacattttatattttctatccctccttcctattatatatatcatttttaaaaagtttaagttaaatccttttttaatagataaaatgctatctgtaatgctttttaaattaatttaaacttagtttaataatttttaatatatttgtctgttttattagttttcaacatgtgaaatatcattatcataagcgccataccactcttgcagtgattaaggagagccagccactagcaataatcctttttcttgttaaaggaaaattaatccatgtaaatatgaaaaatccctgtatttgtagaaataaaaatccatatataaaaattcatatatacataaaatgctgttatacgtatgcagatataaataaatgaaatcttaagtaatgaaactgacaagtggtaattgcatacaaaattatgaaatacagaagaatcaaaatgttttgtatattctctcatttaattattaacaactctgtgaagttggctttatcactactttgtcagaaaaagagattcagggaaatttcattatgttgcccattgtcactcactggaggatttgaacacttatttgtattaattctaaaatccgtggtctttccataccactctgccatctcaagcataatattttaaatcttataagtatttttattttatcatctatttgtatttctacttttttatattaagtaatataataaatattcaatttgaccagcaaggttattaaagctcaaggaggtaaagtgaattgtctgagcttgctcatttctctgggagcccatcagaggctggaacattgcactgatgacccccagctctgtggtcttgtccctagacctccacttggcttctcttcctcttactgctcttaactaacagcatgcatttgtctttagtggtttataatcctttataagaatttctgcctatttaacatatatgaaattattatttttcacctcccaccatctaaaataataattaccctcaaacaaggaagacaaactaaagtcattttttattctgaaaatgtagaactgaactcttcattttcagtatgatgccaaacactactaactggatttcatttaattggattaaaactgacgggacacatattctctcgaatgtgcaacctcacccctcttgcttgatcttcataaaacatcatgtatttagtcagattgcatccctggagatacagttggagtagctggtgactctagagaagtctgaaagtaagaatacgattcttgatgtgataaggagatatatttttgaagtaacaacatggaataaatcaagaatagtctgtgctgaattttgagttatttccagaagtggaggcttcaggtgtgaacagaaaatggaaacctggttttcttaccaattgatttactagatcatccgaggagatttgagacctagttctttctgctactcacagatgtatggaagagctgcccagtcataaaaccaattttgaggccaatttcaagtggacagataatggtaaatctttaattagtttgattatatttttagccagttgcctttctggatttggaatatgctaaaaattaatttacctgtgccttacccattgtgtctattattggcacctcccatttctatttgaataaggtattgaaagtttagaatcattgaaaaaagtatttttatagtatctttaagaatcacagtacaataaatagctaatttaaagcttggatcgtgaaaacacaatggataacatatagtataacgtagctatatgccgaggatattatcaagtgggtagggatttatttccatagttataaaaaatataattgccttgaaacttatgttttacttctacttcgatcaattatatagtcaggtaagtatatgttaaaacctatacgtagtggttgaattacacagtttttcacacattatacaaatagttcatttgtttgagaaagagttgaggaagatcctccagccccttctcactataaaattatatgattctaagtttataagatacaaaaaagccaaataaatggaaattaatggaaaaattgatttactggcttgtgtgagagtagagactgaaattctacttagatgcatgttatgtattatgtttaagctattttaaaagtagggctattaggaaagaattttagtgcaactggtttcttatatagttgctattcagtaggatacttttgaaatggtgaaaagtttgtatctgtatacataaaactcaattcagtaatatgtttgtatccatattgttgatctaatgtagtagtataaaaacaacctaaggaagagcttccatgcgtacacagaggttatgagttgtggtctgagcgaaatatcttttgggattggcttataacaagtgagtatttgcataaataatgccgtttggggagttttttaaaagaaatttcttaagatatagccagttacctaagaaaatattgtgttttctatttatctagttgtaccgacactgataatgttgagaaatctacattaattgacaaagaagaacaatgcaatttgacatattaactactttagtctgagtgaattatttttggatctttcaaaataaacttgctacttgaaaaaaaaatttacatatctgtctaattaatagactatagtttcccttaaatagacggctaatattttacccttatttatgaacagtttttattttgtatgtagtatcaaatcacagaaaaaaaaatgttcctaacttcaaaaatggaagacaacatgcctctcaattggaatacgacttaggtcttggctggaatgttggtgaactgaaggcactgaggaaaaccagttcaacctcattgtccactagaaaacagttcctttacagaatgaagaattaaatatggtggcataaatttaactttcctgctgcttttgatcctaaggtcacaactagtaagtagcagagacagaatttgaactaagaccgttctctgcattccctattttgctatgctatgtagcagattgggctgcacactggtagtttgcctccattatccttgcccttcactacaataatggactgcaaacataaataacagtgttttcattttacagatacagaaatggggagtgagtacagtacaagtacttgcctaagggcatacaataatgggtggtgaagctgccatttggacttagatctctttcctaagtctctattattgcctatattgaccccagacagaagaaattacatttttctcccttttctcctccctccctcctttccttctttccttccttccttacgtctgtccttcctttcattaaagcaaagaaactaagctccctcatatttgtaaggaaagccttttcatatcacttttattcatccattatttgtaaaggcatgttgtcgaccaggtgctgtgctaggcatcatggagtgctaaacagttgtgaacactgtcacagtaccatgtggtctgtagaattttatcacacaatagcaatggcttacttcctgaaaagtagaacagacactccaaaaaacgtagtatttctcttaacaaaacaagggcaaattgaaattgtccttggttctgcttcagttcagcagttttgaatcttcttttgggaactgctggtagagagcaagttcccaatcatggctactatttttagcttcataagactcttgtgtctataaatgatattcccttttttgaggataatgtcttaaatgcagtccaaaatcaattagctattatgtgcaaccaggctacccttagaaaggtgactatccttttttgtatatatttaccagtatttgccacccagaccacaaggcaagggattgaggtagtcactggtatttttctgggagtagcttaagcttataattttcatgtacatatttccctttctctctttccaaaaaggattatttaaatttttcaacatttaagcatagaggaaataaataaaataggttatcttgtcattttctccataaggaacttcttcagaaaagacagtgtgtagacagtcccagtggctgtcccctttaactcaagcccaggacctacagatttctctgtagctcaacaaaatgtctttccacaaagggctggaggattcttaattatcagttgttgaatttcagtcatcctgataacaccatttagccaactgtgatggcagcgatatttgtcttgttaaagaccctgaagttaaattactgctgtactattttccttcaagcctgacttgttagttatggtggaagtgagctattgactggggtcctcccattcatctatacttcctttattattttaaatgatctctagagctaaggggcagcaatttgcattatttattcaatgaattctacctgatagtcttgtctataatttcccttgtgaagagaacagaaagactaagaatgaataaattgtctcttgaaaactcatggctttatctgcttctgtcacagaaatgctatagatttcagttttcttgactgagaaatatttaataacaagaagctctacattctagcagtttaaaaggaggaggatttttttttcccccactctttgtctctcactgtttcttcctctcagctatactttacctaaaaccttaattttttcccccattgcttttatggggattcctctgaaagacataaaatgcctctctccatgagaagccctgtcataggagacagctctttccatctgtatattttacttgccttgcatgtaattttctcatccaaatggaaagctcaccatgctctaatgaaacttactagagactcccagaaaattcatgtaaccaggtttatgtgtgggtctgatgttttaagggacagactgacaattcatggccagaggaggccattaaggaaacaggtttgattgaagtcccgacacagatgttgacagcataattaaaatgattaattggagtaagagaagtgtttcaaactaattagaaaaatggtttggttatacccccagactgtacaaatggccagaggagccaatttttttatatagagaagggaaaagtgaagatgtatgttaaaacaatgtcattcttcttttatcaagaggatactgcaaagtttaaaactatgattattgttatgttggttttcctgtgagtctttaggtctattatcccagccccttttgccaggtggctgactgggcataggcgtgcagccacgttcaagaaacaaagggaatacttgcatagaactggagttggcccatattgacataagacagttctcaatcacaataactatttacttgcatattgcttctccagagagaatacaagtaccccaaattaccatcagatggcttagcacatagtagggcctcaatattttgtgtgtttgctgaggcaaccaaagccatatttttaagtatgcctaaataataggactgagaaatttttcttccagttatgctttcattttcttgattatttctgttttattgtgaatcctagtaaaggcaattcattctttttttttttttttttttttttttgagatggagtcttgctttgtcgcccaggctggaatgtagtggcgcgatctcagctcactgcaacctccgcctcccgggttcaagtgattctcctgcctcagcctctcgagtagctgggattacaggtgccgaccaccatgcccagctaatttttgtatttttagtagagatggggtttcaacaggttgaccggactggtctcgaactcctgacctcaggtgatccactcaccttggcctgggattacaggcgtgagccaccgcgcctggccagcaattcattcttatatcttcagaaaacctgaactatcatggaccaatcggttttagagattattaatgagcattagcaggggcatgtttcagaactctttgcagacacaatttagttaaaacatttcttagtttctataaaagcaaatgtatgctattgtggtgttgaagctctttgtacacaaagtaaacattacgtgaaagaactcctttggcctgcaaacataacatttaaatggctattgaccatatgtttctaactaaaagcactatgaaaaacaagttcttgccagatttcaggtttttttctagttgtgctctgtgaagcctggtggtaggttttcagttaatgcctttggctacatgaacaaggagtttcaccaagaatgttgggaattcctttggtgaccaaaaggaaatatgaagactctggaggctgatgagagagacaaataatggggaagtcataaacatcatgccaattcctgtcatttatttcattttctttttaaaataagatctgaaattgtttaaaagaatttttgaaaagcatcaagttaactttctagcacttttaagtttcatgtaaatcagtattcttcaagtgccacataaatatgtgtaggtaagtgtgctatttctaggtctataatatttaaagatatttaataaataggtttcattcgttgcatgcaggatgctgactaaaattgatagaggaaaggtctaggggtttgtttattttaatttaatacaatgaaatacacttgtaatcctattaaattatagtctattttgtatattcttgataattgaagttattatctatgggtgtgtgcattcgcgatggggggaaaatggtctattgggaagaatggcattttgacaaatcacaggaaatagtcaattatgtggattccacgcagtttccaaggttatgacaaagattttacccctgaaattcatgaaccatagtctggagggagtttggatggaattacaattcaagtggtttgttttgggaggagtatagggtggggacagaattaaatgttcagtttatttctccccacaaaactcgccgtggcagcacccttaagagggagagaatgcaaacttgttttctttaacacaaaatttctagcagtatgaaatactgaaacattccggatgataagggccttaaagcttaggtttatgatcataacaataacctattcacattaatatactcaataaagttggctatatacatgaagtgctaatgaagtaaacaacaaatgagttttccaggatgctgcatacttgaaatttactgagtgtagggtctctttatcaataaagttggaaatttatttttttccatcgttttcctcttgtttcaagtctcttcactgccttgtcatttaagtaaatgacaagtaaacaacacatgagttttccgggatgctgcatacttgaaatttactaagtgtagggtctctttatcaataaagttggaaatttatttttttcctcagtattcttgttttcgtcttgtttcaagtctcctgactgcattgtcatttaagctgttaaggctgaaaataattccccaaaggggacattgaactaaaatatttcaggcaaatttatctctaaaacttttaatctagtcaggaaatattaataatcgatgcaggtggggttgtgcataaaagaaatgctataaaatgctacattgttcatcgagcatatagtcagacaaaacactgcatttactgtctccagaaaatgaaagttaatttatgtatttcatcaacagactttattatagtgccacatatttgtggtagacttaaggccgtgagaaattttcactcttgacttctctctgttaaaaaaaaaaaaaaaatcaaatcaaaacactctttatgtttaaaaatggttacaatacagtaataaaaatgtggcttactctttgcttttcactaataagttgagtagcaattggcaaaaaccaaaaatcgtaaactccctgagctccaatttcctccttaattaaatgaggtcacagagaccaggatccactttaagtagcaaattgaggctcaattccgaaattagaatgtgcagctcccattcaataatccatctttaataaaaatgtagattaacattgtgtcccatcctccagcccaagtctgcagtagaagggacttgagagtaagatgcttggtgcttctttttctttcctctcttgcagttcacctcattcttcaactgctggttctcatttctaaccctgctagtgtcaaagtgagagggtaggggaggacaggtgaggaaggtagggaagttcgtacttgactttcttgagatggctttgtatattcttaccaggtctctctctttcttgagatctttcttaggctcctttgaggcctttactgtggatgtttgaaagcacatctgtgacattgatgatagatttttctccagctctctgctccctttgcaccccgtggagatctactcctaaaattctctctgcaggaatctcattagcctccagtggttttcctggacaggagacaaaaaagctacagtcgtactctctctattcctctgtaacccacatcttgtccagggacattgatccctggctccaacaaagtctgagaatgcaggtcaatcccaatacagctgcacctttctactttgtgcccaaagcagttcatcagttgcttactttgtcctctatgtttcctgtatagggaccaatcacagttcactttgccgtattaactcagagcaacatattaagctcttgaggggtccctctgaagctcctctgtcttaacttgagaagcaagcacagaataactttctccaaacagatctttaacacaagtccttcttcctggtttcattggtttgcactaatttttaatcctcaatgtagattttaggccatttagctctctgtcaccctactctgacattttgcaaatggtattgtatcgtgtgtctaacaactcagctgtctgctgtctgttttatcttggtgcctcagttaaagaatccaatgtaacatgctgttgcaaatgagttaaattccgatagccttcagaactaattttttgtttctctttgtgaatccatcccatgaatctcgatttattcataaaaatatagttgttcaggccgggtgaggtgactcacgcttgtaatcccagcattttgggaggccaaggtgggcagatcacctgaggttgggagttcgagaccagcctgaccaaaatggagaaaaccccatctctactaaaaatacaaaattagctgggcatggtggcacatgcctgtaatcccagctactcgggcggctgaggcaagagaattgcttgaacctgggaggcggaggttgcagtgaaccgaggtctcaccattgcactccagcctgggcaacaagagtaaaaactccatctgaaaaaaaaaaaaaaaatctagttgttcattttgaacatttttgaaagttagggattttttaaaaaactgtcattataaaattatggctaagaattaagggatgactgttcctgctagttagcatggttcataattggttgttttttgtttgtttgcaaattgaatgatcaattgagttaggtttggttctttcattttagagattgccaatatatgtaaaatttgtctagacagggattgatgtccacagaacagaaaatcatataggtaattatataaagtaaactaatttcagttagtttacttcatgtaaaataagtgaaaacaattcaatcttaaaaggtcttcatgtgacgaaattgccctaagcatctcatgtatgtataaggcactatagtagacagtacaggggccacagagatggagagaactaagctccctctctcctgggacaaagcttatgctctgctctgaaagtgtctgtcttgagtgagccttaatcagcatcgcgaatatggagtatcttagtttcttttgaatggtaatcgattgtttaggggaatagttttaaatttactaaataatgtgtttttcttttaatgttaaggaatataaaaaaggacccccaaaatgtttcataatctactgcacagataagccttttgccataaaaggtaaaagaaaaacaaagtaaaaacaaaaaactataatgtgcatggtaaaaaaaaaaaattaatactatggaaagctataaaaggaaaagtggacatcttctgtgccattttctccttccaaatctaccattaacaattctgcctgcttttctagaaaatattatgtgtatatatatatatttgcacatatataaagttattatagatatgcctataccaacttgcttacttgatttcttccctcctttcctcagttgttcattttgctttttctcttaaagcactacctcattctttttaatagcaacgttgtatttgctgtagttaattagtccactcttatggaggctttcattggtaatacaaataatgacgtgatgaacattttcctgcaaatttccttatgaacctctaggatcgtcttcttaggattaatttctctaagagttgctgtattacatcaaagaaatcctgagttttctgttattgtaatagaaattgctaaactgcccataagaaattatccatgcatttacacttcacccagtacagttttctgtgtttcctcataattgctctaacattacaatcactgtatttacaaatgtttgccaatctgaactgtgaaaaacacaatctcttaattttactatatatctacttcattacaaaggaggataaaatatttgtatgtttctcctggaagcctacccttccttacagatttttcactttgtattgtcttttactgacttttttgagttttttttagattaaggaaaatacatatgtatttgataaggcattgcatagattttccccaattagttttctgcattttgattttgcttatgatatttttgccatatagaagtttaaaatatatgtataataatatctcatatgtttttcttttgtgctttctaggttttgatgtctacttaaacacctttcccaccaaagcttatgaataaatgcaaccattctttcttctagattttttttgtatttatttttatattttagtgtaagcgatggaatacacatgtacgtgctcatacattgcatacacacacacacgtacctgtgtataatttcagtccaatcaactggacctagagtcccaacactaattattgtaattattgaataacttctccgtgtataccgatttgaaatttggttgcgtcattatggatttaattctcatatgttttggttatatttctgaattcttctattttttacatttgctatagatctatctcttctccaaaaaagagtattaaaaattatgatttcataattatttttaagactattctcccttcttgattcttaattttcaaaaattttctgcaactgcgtctttttttgagacaaatattttgttcgtttttgcaaacatacactaatttatggataattcatttgggcctacattttacttataagttaattttgaacaattttggcttctttatacattcaggtcccccttttatagtgcatgatatatctatttattcactaaaatattttatggtatgtggttgaattttaaatttcttcacttaagtgatataaatttatgttagatttatacccagtattttatatttatttttaactgatacatgatacatatttataaggtacatgtgatattttgttacatgcagtagagtgtataaagatcaaatcaaggtatttgaggtatccatcactttgggtatttatcattgctatgtgttgggaacaattcaagttttctagctaggttgaaatatacaatacattgttgttaaacatagtcactctattctgctgttggataatcactcttatgccttttgtctaactgtatgtttgtacccatcaacctacctctctttatccctcttgcacccataaacacttcccaccctgtagtttctatcattctactctcactctttatgagatcaacttttttagctcccacatgtgactgagaatatgcaatatttgtctttctctgccaggcctattttacttaacatagtgacctccagttccatccatgtcactgtaaatgacatacattcattctttttttttttatggctgtacagtatttcattgtgtatatagtattttatgtttttgcttgctattgaaaattggttcatgccttcattatacttaatacgtttaaatggcaattttatatattgctttcttatagaataatcttagtgttcctaatatatttttaatttgatattcttgggttttgttaggtgtaatcacatcacctaagattggtgataaatatgtctgattctggcttcccatttctgcaactctttttctttctcttatctgattgcattatctagtacctccagagcagtatcaaattatggcacatttttattatgttcttcattataatgagaacaattcttatttccccattaaatgtgatggtggcatttgactttgtgtgtattggtacaaataaaccagatatttttattatcaggagttttttattattaatattagacgagctctgtgtgccattttgcgttaaaggagtatagatttatagaaacatttatttcttaaatagctataagctactttctttgcttgattgaagctgggcatttttgctgttcttttgcttataattaggtctgtaggaaggaagattttgtaatcatgcttcattttgccatctgaaaggaaaagtctggtgggaatattttaattattcatcatggaatctctgtatagcaaatcaaatagagttatgtattttttacttgatgattttgctaatgtggttctaatactcacaacttaagcaaccaaaaacaaccaataatattttaaaacaacataattaattattgcttgaaagtttctaccaaggggcatatggacttctatgagatccaattataaaccaggaaaaagagagatcaacacttgtattttaacacatatgcagtttcttattagcaaaatttcactgataaacatatgctaagttattatagatgtgagccaaaagttctttagaagtaggtatattctgcatttgaactctacagcatttgaaatcacattggctgacacgaattagtattagatctggaaactttgccagtaattcttctagtctccaggaaaagtgaaagcctttcattttggttttctttttggtttgttggttttgctttcatttctgatttttgtttggtggtaggtgcttttatgaaatacttttttaaattacccttactatttattgattaattgttggtaattattaattatctacctttcttagtgtttttcttcaaactctgcaattaggaatacccacatattggaacatttgctactctatctcattccacatgtgtgtgtatggtgtatatatgtgtttacatatttgtgtatattaatttccacaagtattttatgcccataaatattcatgccataatagacttttgttcatttatgatgcaaaaattaactctgaagcaaactgtattcttgcttctcatggtcacatactttctctctctgtctctaagctttgttaacctagtggtaaattctgtggtacccatttgcatgcatacatacgtgtgtgtgtgtgtttatgtgtgtatagatatagacatagatatagatattcttgactatttgtatccatggtgcacgtgtgcacgtgcgcacacacacagacacacacacacacaagtatgtatacatggaatagcaagtctctaggggctttgctgaagttaaaccaagaatttcaatatatgatactactactaaacagtatcaggccctgcgaacatgacacattcattgccaacatcaggacacctaatagagtggatactgaccaagggggtgtattcttgcccagatgatacttatttaggcaatgccagtgttggctaatttcacttttccttcatggcctctgtctctctgttacttatgtagcactcattctgtgtcagactgtgttctaagaacttcaactatattaaccttacttaactgttaaaaagacttctgagatagataccatttatccatttcattttcaggtgggaaattgaggcataaggcatttgggcaatgtgttcaatgacaattaaacagctagaaagtgcctggttagctaggatgtaagccaggcattttggttcctgagcccacactcttatacactgtaatactatctcattcatcctgctgtaattattcatttaattacatgagctcctgccagactgcatgttctatgaataaggggccatgtcaatcttgcctgtctttctatcttgtgtcatcataatgcctggtaggtaatagggaatacataactggttttcacttttaattgaattaaagtaaaagtttgtctctataagatcccttttcatatatcttcctgataaaaaacctgtttaataagctgaaaagatgaggtttcattaagaagaggtgatacagaaaaacaacaccatatttttctaacttatgcctcatctggcttactgcttagttcccatttgtcatcagtgcacttaaaaaattattttgaaaaattgccatttttaatatctttggaacttcctaacacattacctattttttaaccaaacgaggtgattccttatgggaaaatatatacagcaagaaaaaaaaaaggaaaaaatgttgatgatacctgtttaattgggaaatatgtttgcatatttattatatctcggaaagaaatgtatgacttattataacagcatttagtcttccaaaatatcagtgactccacagtatatgccttcatttccaaaatgaggggaaaagcattgagtgtatagtacttcctttttttcccccacaaagaaaaaatcatagtggaaattacattgaagaataatctgcacaaaacaaaaaagcacaaatcttatgtttctggttcagtgacttttgataaaggtaacccataattactaacccaatcaagatacagaaccattctgtacctctggaaagttcccatagtctccctcccagtgaatcttccctagtcaccccttggtaaccattgataggatatctatcgcaataacttaattctgcccattcaagaacctcattttaaaccttacaaaaccagaagttattgaaagagatgtgattgtaaccatctttgtttttgtaaggaccacgagttaactacacgtagatatatcatccagagaaaagtcctgataaaagtataatcagtgcaagttgaattcacaggtaaggtttactgtagacgtggaagggtgtttcaaaattactcttgagaaacaggtctcaggctaacagtttctctcacctctgttgcattgtctctttcttttgaataactactgtgtgctgtggtttcacaaacctctcagtaaagtagtgatgggaaaatacttttgttctatgttttgttgacctagtggtaaattctgttacccagctgtcaagcaattagattataataatgaatattttcttaaggcaatttattgggccaaagaaccctgtgaataaatagtagtatcttttattttcagagagcctagttaacatccctccacttgctaaaactagccagaatgtgatattagtgactttcattctattaaataagcattcatgattatcctaaacattcttgccaaatgtgcatatgaaaatagcatagccactgtaattgttaagtcagtcaatttttctcaaggactgtgttgctttaaaaagttagtagtgtttacacattcatgtgattggtctgaagtttacatgctaaataatatttactgtgaaagatgtgtgtgtttgtcagtggatgtgtgcatatattcagatacctaatatgaccaatgtgacaagggaccccatttttttctgccataaattaagggttaatgatagcatttattgcattgagctgctgagaggaccaaatgagataatgcattcagaaatgttgagtgttatttggtttggaaattgataaaaagggcaggtcttacatcgagtgcagctttacaacatattatccatgcatgattacatataaacaaaaatgtttagtttagaaagggaaaaatagtgggtacaatcacagttttattttatttttatatatatattttttattatcctttaagttctagggtacatgtgcacaacgtgcaggtttgttacatatgtatacatgtgacatgttggtgtgctgcacccattaactcgtcatttacattaggtatatctcctaatgctatccctcccccagcccccaaccccacaacaggccccggtgtgtgatgttccccttccggtgttcaagtgttctcattgttcaattcccacctatgagtgagaacacgcggtgtttggttttttgtccttgtgatagtttgctgagaatgatgatttccagcttcatccatgtccctacaaaggacatgaactcatccttttttatagcagcaaagtattccatggtgtatatgtgccacattttcttaatccagtctatcattggtggacatttgggttggttccaagtcttggcgattgtgagtagtgccgcaataaacatacatgtgcatgtgtttttatagcagcatgatttatattcctttgggtatatacccagtaatgggatggctgggtcaaatggtatttctagttctagatccctgaggaattgccacactgacttccacaatggttgaactagtttacagtcccaccaacagtgtaaaagtgttcccatttctccacatcctttccagtacctgttgtttcctgactttttaatgatcaccattctaattgatgtgagatgatatctcattgtggttttgatttgcatttctctgatggccagtgatgatgagcattttttcatgtgtctgttggctgcataaatgtcttcttttgagaagtgtctgttcatatccttcacccactttttgatggggttgtttgttttttttcttgtaaatttgtttgagttatttgtggattctggatattaaccctttgtcagatgagtagattacaaaaattttctcctattctctaggttgcctgttcactctgatggtagtttcttttgctgtgcagaagctctttacgtagatcccatttgtgaattttggcttttgttgctattgcttttggtgttttagacgtgaagtccttgcccctgcctacgtcctgaatggtattgcctaggttttcctctagagattttatggttttaggtctaagatttaagtctttaatccatcttgaattaatttttgtataagatgtaaggaagggatccagtttcatctttctacttatggctagccagttttcccagcaccatttgttaaataggaaatcctttacccatttcttgattttgtcaggtttgttaaagatcagatagttgtagatgtgtggtattatttctaagggctctgttctgttccattggtctgtatctctgttttggtaccagtaccatgctgttttggttactgtaacctcgtagtatagtttgaagtgaggtagtgtgatgcctccagctttgttcttttggcttaggattgacttggcaatgcaggctctttgttggttccatatgaactttaaagtagttttttccaattctgtgaagaaagtcattggtagcttgatggggatggcattgaatctataaattaccttgggcagtatggccattttcatgatattgattcttcctatccatgaacatggaatgttcttccatttttttgtgtcctcttttatttggttgagcagtggtttgtagttctccttgaagaggtccttcacatcccttgtaagttggaatcctaggtattttattctctttgaagcaattgtgaatgggagttcactcatgatttggttctctgtttgtctgctattggtgtgtaagaatgcttgtgatttttgcacattgattttgtatcctgagactttgctgaagttgcttatcagcttaaggagattttgggctgagatgatggggttttctagatatacaatcatgtcatctgcaaagagggacaatttgacttcctcttttcctaattgaatgccctttctttctttctcctgcctaattgccctggccagaacttccaacactatgttgaataggagtggagagagagggcatccctgtcttgtgccagttttcaaagggaatgcttccagtttttgcccattcagtatgatattggctgcgggtttgtcataaatagctcttattattttgagatacatcccatcaatacctaatttattgagaggttttagcatgaagggctgttgaattttgtcaaaggccttttctgcatctgctgagacaatcatgtggtttttgtcattggttctgtttatatgctggattacgtttattgattttcgtatgttgaaccagccttgcatcccagggatgaagcccacttgatcatggtggataagtttttgatgtgttgctggattcggtttgccagtattttattgaggatttttgcatcaatgttcatcaggggtattggtctaaaattctctttttttgttgtgtcgctgccaggctttggtatcaggatgatgctggcctcataaagtgagttagggaggattccctctttttctactgattggaatagtttcagaaggaatggttccagctccttcttgtacctctggtagaattcatctgtgaatccatctggtcctggactttttttgcttggtaagctactaattattgcctcaatttcagagcctgttattggtctattcagagattcaacttcttcctggtttagtcttgggagggtgtatgtgtccaggaatttatccatttcttctagattttctagtttatttgcgtagaggtgtttatagtattctctgatggtagtttgtatttctatgggatcagtggtgatatcccctctatcattttttcttgcatctatttgattcttctctcttttcttctttattagtcttgctagcagtctgtcaattttgttgatcttttcaaaaaaccagctcctggattcattgatttttggaagggttttttttgtctctgtttccttcagttctgctctgatcttagttattccttgccttctgcaagcttctgaatgtgtttgctcttgtttctctagttcttttcattgtgatgttagggtgtcaattttagatcttttctgctttctcttgtgggcatttagtgctataaatttccctctacacactgctttaaatgtgtcccagagattctggtacattgtgtctttgttctcgttggtttcaaagaatatctttatttctgccttcatttcgttatgtacccagtagtcattcaggagcaggttgttcagtttccatgtagttgagtggttttgagtgagtttcttaatcctgagttctaatttgattgcactgtggtctgagagacagtttgttgtgctttctgttcttttacatttgctgaggaatgctttacttccaactatgtggtcaattttgcaatagctgtggtgtcgtgctgagaagaatgtatattctgttgatttggggtgaagagttctgtagatgtctattaggtctgcttggtgcagagctgagttcaattcctggatatccttgttaattttctgtctcattgatctgtctaatgttgacagtggagtgttaaagtctgccattattattgtgtgggagtctaagtctctttgttggtctctaaggacttgctttatgaatctgggtgctcctgtattaggtgtatatatatttaggatagttagctcttcttgttgaattgatccctttaccattatgtaatggccttctttgtctcttttgatctttgtttgtttaaagtgtgtttcatcagagactaggattgcaacccctgcctttttttggtttccatttgcttagtggatcttcccccatccctttattttgagcctatgtgtgtctctgcatgtgagatgggtttcctgaatacagcacactgatgggtcttgactctttatccaggttgacagtctgtgtcttttaattggagcacttagcccatttccatttaaggttaatattgttatgtgtgaatttgatcctgtcattatgatgttagctggttattttgctcgttacttgaagcagtttcttcctagcatcaatagtctttacaatttagcatgtttttgcagtggctggtgcgctttgttcctttccatgtttagtgcttccttcaggagctcttgtagggcaggcctggtggtgacaaaatctctcagcatttgcttgtctgtaaaggattttatttctccttcacttatgaagcttagtttggctggatatgaaattctgggttgaaaattcttttatttaagaatgttgaatattgacccccactctcttctggcttgtagagtttctgctgagagatccattgttagtctgatgggcttcactttttgggtaacccaacctttctctctgtctgcccttaacattttttccttcatttcaactttggcgaatctgacaattatgtgtcttggagttggtcttcttgaggagtatctttgtggcattctctgtatctcctgaatttgaatgttggcctgccttgctaggttggggaagttctcctggataatatcttgcagagtgttttccaacttggttccattctccccgtcactttcaggtacaccaatcagatgtagatttggtcttttcacatagtcccatatttcttggaggctttgcttatttctttttattcttttttctctaaacttctcttctctcttcatttcattcatttgatcttccatcactgataccctttcttccagttgattgaatcggctactgaagcttgtgcattcatcacttagttctcgtgccatggttttcagctccatcaggtcctttaaggacttctctgcattggttattctagttagccattagtcgaatcttttttcaaggtttttaacttctttgcaatgggtttgaacttccttctttagctcagagaagtttgattgtctgaagccttcttctctcaacttgtcaaagtcattctccgtccagctttgttccattgctggtgaggagctgcattcctttggaggaggagaggcgctctgatttttagaattttcagtttttctgttctgttttttccccatctttgtggttttatctacctttggtctttgatgatggtgacgtacacatggggttttggtgtggatgtcctttctgtttgttagttttccttttaacagtcaggaccctcagctgcaggtctgttggagtttcctggaggtccactccagaccctgtttgcctgggtatcagcagtggaagctgcagaacagcgaatattgctgaacagcaaatgttgctgtctgatcatttctctggaggttttgtctcagaggagtacccggccttgtgaggtgtcagtctgcccctactgggggctgcctcccagataggctgctcgggggtcaggaacccacttgaggaggcagtctgcccattgtcagatctcacactccgtgctgggagaactactactctcttcaaagctcagttggaaatgtggaaatcacccatcttctgcgtcactcacactgggagctgtagactggagctgatcctattctaccatcttggatggagtacccacaattttaacctaaatgatttcttccaaaattccatagtttactttttagattgagccatatatggtgtactgcacaagtggattaagatattttaaggtatttttaggagtaattttgactatacttgagctaattaacgctgacgtcgaatctattccctggcaaaagtaaactccattgtattcctgttctttagtccttttggtagaaacccatttgggatattattccaacatatattatctatctatctatgatcttgctttgtacaaatacataaatagatgattcccttgcttttgatattttgggttgagtagaaattttgcccctctcatctgtccataaggttggcctcatctgtgtgcaagtctgaccattatatctgacaatggcttgagtgtctgcttttttagttttgtgctcacctcaaggcctttttagttgaacttggcctctctccatgctttggcctaaatctgagggttgccttattacaatccttcaggagacttagtgtgttattcagaaagttggatacaatgtgtttattttacgatgcatttgggcagaaatatgcctgggaagaattgaaactagattgttccttatttttgtttgtctactttgtgactcagtgcctttactacaaataatcatgacgagatcagcaagatctggttactatctaatatgatacctacagagactctctaatccaaggctttatgaaacatcaaaatgtgaaaaggatgatgaaggcttcactaagtagtgaaaatatttatacattaccacaaagtcaattgacactcaaattaaaacaactatttgccgggcgtggtggctcacattgtaatcccagtacttgggaaggccaaagcgggtggatcacctgagatcaggagtttgagaccagcctggccgatatggcgaaaccccatctgtactaaaaacataaaaaattagccgagtgttgtggcatgcacttgtagtcccagctactcaggtggctgaggcatgagaattacttgaacccaggaggcggaggttgtggtgagctgaaattgcgccactgccctctagcatgggtgccagagtgagactctgtctcaaaaacaattaaaaaaaaaaaaaaaacctgttttttagcaacagttaaaaacagcaaatattttaaaaaattgataaaaatttttttttgctatcaaataggatagaaatttaaaacatattatttaatgtggcaaagatgagcagaaacagttactttcatatactattaagtataacttagaaaaacttttgtgttaccacttgggaatattcatcagatttttaaattcatgtttcttagggccaatatttctacttctaggaagtggaatgatataggtacaggaatgtttattgcaggcatattggaaccattacatgtccaaagtgagggggaggggcgattaaatatagaacagatgcgtatatggcattaaaaattctcaaatatatcattaatcgaaaacaattctgcaaaacaatgcatatagagtgatatgttatataaaaattgatttgtgagtatatatttataaacatttacaattgcataaaaacattagcagagaataagggggattcagggaagggtgataaaggggagaagaacaaacatcaacagaggacctaattgtggcagaccgtgactatattttataacttagcagagcttccaggggttttatcataaacacagtatgtcttatctaggtattcttatgcttccacagcaaagtatgaataagtatttaagaagacaacctaaatatattaattgaagcttgctggctaaagttggcttcttttctgaggaatatatatgaaggtaactagcagcaaaacatcatagatagtatcagtcttgggccttcttcacatactttacattttcccatctataaaaagatgctttggaaacagccatgagagtccttcggagtagcccaatctcggcagccttattagatgcatagatgtgtgtctcctggtgagagtctcatgctgtgaaagtcattagaataataaattaaacttctttgtacacaggctttttaagcttcaggtgcatatccttttatgccttttccattttcttatagcttgaagtattgagatttttattgtcgaccaattgcttcctccacagttttgccagcataatgagttcgtggagtcactgatgcctaaaataatttgtggagtttggtttgaaatagctccacgtagtcctcctttttcccagttcctaagagctaactaaaaagataagacctagttaatgaaaataaacttctcaagggtcaaaatggaatatcgtataaaattatttttgatattttatattaggatgtgactacaggttccactaatgttaatatcaagattattcaatagtacctatttatatgtgtggaaattattgcataaaatttcaattttcacatagattttggaagaggccttggctgcaccaaatggaaattttataaatggaataatatttgtgggaaagccttcagaaagcaataacataaatttaacattaagctgtgccttttaaaagtaatatcaaagcaaattaggagatatatatatatattctttaaaaaattttttagatattgccattcaatttaagaaattcagtggaaaaaaacatttttccatcattcataatgttagcatggattattttctctcttcgtatcaaagaagtaaaggaaaacaatacaacattacttcttacaatggtgattgacatctggatcttctaggctaaaatttgaaaaaaaaatattatttcaaactacaatgaacatgaaacaaaaagacagtattctttgcgttaagtctctttgtattcgttccctccggcccatactctaagaaaagatcacctttgctctcttaggtatctctgttagtccttaatttctcctatggatgcaatgtccattgccctggccgccttcaaatcattctccttcacttctgccgttaggtacatgcaaatgtctactgtatttcctctgttactgaatggaaaaagaaatcaccttaatttagcttccaatttttctagttccctaaattttattttgaaacttcttgaaccttacattttcattgactttcttccagtttttgaacactgcctccttaacatttgtgagctgtggcaggttctcaccagtttactgtactgagtactctctgggaacctcatatttgaattaagtgattttactcatttgctcttattattttgactgaaggaaaaaagtcacatagtataattttagcagagaggatgtgaagtaagagttgaaccaactttaagctttaaaaatattccacactgttgtatgcatataaatttgagacagataaagaaatccttctttgtaaaaatgtaactaaagtcaggtttatttttttcatataaagtgcctaaaataatttgtgaaatttgaattgcaaataggatatatcataatttaaaaatatgattactttgttaagtgatagttgtattatcagtgccatgcagacattacccaaacacatagatctagattgatcaatttgagaactataacatgaacttagaatcctaaggaacaatgcctccaaatatgtgtttctgaatcctttttttgtttgtttgttttttaaacagggtcttgctttgttgtctagactagagcacagtggtgtatcaaagttaactgcagcttcaaattattgggctcagtctttccacctcagctcctgagtagctggtactacagctatgagccaccaggctgagctaatttttaatttttttttttgtaaagacatggtctcaccatgttgccaagctgatctgggatcaagcgatctgcccgtctctgcctctcaaagtactggtattataggcatgagccaccacacctggcgatatccaactgttttaagaactagagggaatgcggtatctctggggccaagagttccctgtacagcccgaatagcaaatcaactactttaacacaaataaaattagattaatcttcctgcatcattttattcctctttctatagcggggctgtgtcactttttgatgacttttttgccatttttaaaaaatctatagcttgacatgaaaataaaagtcagtctctaatagaaaagcattttggtccttgatcaagtaatcaaaacaattataaaggctgatcagcaacctagatgtctaataatggggaaaatattatatagaacacaaaatgatctttggtaacacatggaagaactaaaaaggtaaaagactacaaatttgtatataacatctagtgaaaattgtgtaaacattatttctgagttgaatatacagtatttatggagagaattgaatgtgcttaaaattttgatatgtttttccattttatgaaaaaactgggaaatgtgaattaaagaaaaattaacattcatttcatcattaattgtaatagaaaaatgattttacctaattcaaataatatgtaagtattcagttattttacatatctatgtatatctatgctaaaacatatattcaaaaatgtttttaataacctgaaaaacagttgggatatattaagaaagcaacatacaatgtgagtgtctacgtgtgtgagtgagagagacagagactgaggcaagaaataacatttaatatgatgttgaaaggaaatgtgccaatataaaagcattggtataatcacagatgtttttaatacaactctccatattccaaattggctgttaacatatattgatatttataatcagaaacacataataaatagtatgttgtttacaaataaagcataatactcaaagaatgtactatttttaaaataatgttggtacttgcttataggaatataattgctttttgtttattgctgactttctgtagtttctattttttcctataaagaacatgtatcactcttagaagaaaatataaagttgatttttaaaaagaggcaaataatattcccctatgcttaatcaaatattttgatgaagttagaaaaataagacagtaatgcactttctctacaactcgattattactaatcaggaaggacaatagtacattttattttattatgctttcttcctctgttctaagccaatagataaaaacaaaattaagaaggatatgttcaaacatccctaagaaaaaaaatcaagatttcaacttggatagaaataagggaaacattgctacatctttcttttatacatacagaccagtttgcacacacaactcactgaaactgtaactagctcttcacatcctgcattagtagtcagataattgtaaaatgtgtctttgtatatagatatgggatacttatgtggccatcaatttagttgactttctatcaaaattgagaagttttatcctgaaatagcttaccaatggaagttagaagtgggtctgacattgcattatttggtggaaaaaaccatcaaggtctgtgcagtaaagctgatgcagctctgtgaactagcaaatcctattagtacttagcctgatcacctgggaagatgaaattgtccttactgagatgtggaaggctgaaagtgaaacaggttgatctatatttattggagtattgctgggtagaaaatttgtcatcacgttatccccaatgcctagtatctaggtatctagtggcacttaataggtattcggtaaatatttgttgaatgaattcctgaattctaaaaggcttcaatctgagctatttttcacatcactactgaaaaatgagagttcacaaggagctgttaaaaaaaaaaaggtcttcactttcagtttaaatagaatgaagaaaaatgagatttttttagattttttgagtttgtgacagtctcaatttgtattagtctttttttaaaaatctcacaaatatttatagagaaaaaggaatgcttatatactgttgctgggaatgtagattagttcaatcattgtggaaaacagtgtggtgattcctcaaatacctgaaaagagaaataccattcgacccagcaatcccattactgagtatatacccaaacgaatataaatcggtctacatacatgcatatgttcattgcagcactattcacaatagcaaagacatagaatcaacctaaatgtccatcagtggtagactggataaagaatatgtggtacatatacatcatggagtactgtgcaggcataaaaaaagaacaagatcatgtcctttgcaggaacatggatagagctgaagccattatcctcagcaaactaaagcaggaacaacaagccaaataccatatgttctcacttataactgggagctaaatgatgagaacacatagacacatagaggggaacagccggcaccggggcctacttgagagtggagggtcagaggagggagaggatcaggaagaataactaatgggtactagacttaacacctgggtgatgaaataatcttacaaccaacccccatgacacaagtttacctatataatgaatctgcacatgtatgcctgaaataaaataaattttaaaaatctcacaaatgtttatattaggttggtgcaaaagcaattgtgttttttgccattactttcaatggcaaaaaccgcatttacttttgcaccaacctaatagtcatttaaaggaaacttcttaagccagtgtccccacctcagattctcagatcatcactccttaacacacacacacacacacacacacacacacacacacacacacacactttgagtgagggtgaggaggagagagggaacaatgaagaaaaagttctgctaattaagggaactgctgaagtttcagctagtcttggtgatggttgaaataacatcaaggaaagagggaatataggaaagacaggtgggaaaatgattcagagtctagagctaagggacaaaaagagacagaaaatatggggaactaatgtggaatagattattgatcctagaaataaatgtagctaaaattctttccagtaaagaggtcccaaattggtgataggtgggacttttaaaggcagccatttttatcacactctccaattctaccccgatttacagtgataagttttcttagtaaagaagcagctttgtctgaaacttcaattccaaacctccgagactttggcttaattaatctgaagatacaatgcagacaccagcttttctttcagaggttattttaagtttaaaattatgtcttcctaacaaatagcccaaagaaatgacttcgtggttttcctttcgtacattcagggatgatggacagcccggcctcatgacaggtgttccaggaggtctttttaattgacttgtctatagatgtaaagaatttgaacaaccaagttgtctcgtattttctctatcactttcctgagggacttttcttaagagaacaagtgaactatgatgtcattatgtcatttattggttttagttggactttgttgagcctatgaacctgtttgagatatagtcataatatcttgcagctcatgtctgaaaatttatgtgaacacttcacagaaagttctgttcaggttgtacatccattttcatgttagataacttgttttgggagttctgcctcttagtaaatttattgcttttgataatgtgtggaacttttaatttctatattttagttctttttagactcaactatgcacaccctttagatttagtatttggcttttaaggcatatttagaccagaccctttctattggttaattgtggtataaacctggctcatccacttgtgagactcttagattccaagtgtctaataaatcaccagaggaggaataattaaaagcttctttcagttctagtattaaatcaacaaggttgcctggaccgtgcttctagatgtgctgtaatttatactattagtgtggattgctttggttttctaaaaataataaatgacccagtgaatagcatttggccagaggcatacaagaaacaatccatagtatatagatttgttcaatggcatttaaaagaccttgattagaattcagtctgggctggagtgatgagaatgctgtttactgatgtctgtttgaagtctccctacatggcagaggctagagggattcacaaatagtaacatttcttaactccaatggctggatccagctgtctggaagagctgacattttaaaagagaggtacaaaaatgtctgaatgtcatgattgctaatgtcattttcatgattttatttttaagcgatctttgtttgctccgtgctctagcaatgagctgggttagaattcccaaaacgctgtgttaaaaattccttgtgaaaatgcagtggttttgttcatggagtgggaagtgtcttctctgacaaagctgttcactcatacctgtggtttctgccacccaacctaagaatcatttcaacatacttaatgttttaagattggtaacacagggatagaggagaggcagggagaaggcaggtacaagccaataagtttgaatagttcatctttgaaacagaaacagacatttgattggttttgccagtgagcctgggaaattcctagtgttgaaaaagcaaaaacatgtacttgatggtccagacaagtttatgaaccagaatgggatttaaatatctagctgtaaaattatgttggaaacacacagacacacacatgctttactgagtgagaaaacatgtaggaagtgcttgcaaggaactaagggacaccatgcaccaataaccatattaaaacatgatagtgatagtgtttgttgtttatataagcatatgtgtgaatatgtatgagtgtatatgagaacatgtatgtgtctgtgtttgtatgggtgttattttaaaggaaggtatgacatggcacatgtaacataagtaattttgttttattggttccaaggaagcctttacatttgatctaagtttctcaagaaaggtccagagtaaagatagatatgatactctggaggagagaggaattaaaaccagcaaacctgactaacccagagcttaaagaactaggcgatgtttcaatcagtttcatttacaagaagttttttttaaattatttttccatatcctcgtcacctttaaaagattcctctattcatttatttcttcatttattaatcatttgaacatttttaagtaacaagcatgtatcaacattctgtttgatgggagagattcaaagataacttctagatcacagaacaacaagcatagccaaaaggcacctggtaagtagggggaagaggaagacaccgtagaagtgcacataagcttccaatgattgccgttagaatgcaagttcaaaggtgtgaaacagttaagtaagaaaccctgtctctactaaactacaaaagaaatgatctggatgtggggacgtgcacctgtagtcccagctactcaggaggctgaggcaggagaattgtttgaacccgggtcgtggaggctgcagtgagtgagatcacgccactgcactccagcctgggtgacagagcaagactctgtctcaaaaaaaaagaaaaaagtttaccaaagcattgattttattttatttaaaaaagaactttaataattccgggttctatttgttttataatgagataagctaaagtgtcattagtttccccttctgataaacaggatgttacctagtaaataataaaacagaaatatttcagaaatttaggttggaaactattgaaaaaaaaaataatggttttgttgggaggcaaagtcccaatgtctctttgagccaataagcaaccaaataattcaacttgattttttaaattgcactgtttttatgtattggtttttttgttcctctctctcaattttactgttattcctctaataataaatgtctcggggagacaaagcacatctttcttgtgtgatgggaaaagggaaactactaattgaaatatgtactctgcctaaaattagcattgcataaaatggaaaaaggacaaaaagatttgtcttcaagtttacttgtctataaaatgggaatgataatagaacctgcctaatagcattattgtgatgtttcagtgagagagaaaaaaaaaaacaaaaaagaaaaaacgccttgaaaccattagagtggcgcctggaatatagtaagtgctcatttatgttatccctattttatgcttatatattattaaacctaaatataaatttttaaaacgagcaggaaaaattctaaaactgggcacacataactttctctgggtttttaataccacaaagcaggtgcttgaaattactttctgaattattgtatgatgtttctcatattacagttactgtctggaggccacatgcatgtggtggtgatgtcatggtctctttctgtgttaatcttgaattccttctgtccatttgcttccagaacccactgatcatgggcaatccagtgagttctcagcactgttactcagggtagaagcagcttctgaaactgagaaaaaagaaaaaagatactatttggtcatgccaaggataatcctccccctaaaagaaattttggcttcccaataataccagctgggtgttctccctaacttctggatgcacatatgtaaggaataattgtgattcagcaaaagaaagtgaatggaaatggaacaaattgaaacaattaaccaaaagatgcagaagggaaacaagagtcagacttgacccctagaccttgtgggaaggaaacccttggtgttggtttgaaaaatgataatgatcagtttctgtttccagactgttatcagtggttaaggtccttatgatttgtgctagagactgggaaagaatgctaacatgaaaccaagcaaacaagtagcaagtaattgagccttgagggatccctttggaaagcatcttgtcatttagaatgatgcatttttgatattcttctagctggtttctgagtgcctgtttgcaggaaatgaaattctaggctttgcagtttgaaaagggttgtataggggtgggtagtgttctcagaagtaatcaaagcttttttagtattaaagatgactgtggaatgtttagagctagaggcataatgatgcaaatcaaatggcgtattagtatcctgcctagtaaatgtggaagccttaaaaattctgctggtggatgggtggtcagcattagagcattagacacaaggcactggggcaaagaaacccagaaggctgtgcacttttgctgggaaagagagtttactgtgagggctgagtgggacagcaatgggcttgcagagaaggggaaatgtatcagcctggggactataaccatttgacttttctccatctgcatgtaacaaccaatccaaaacggcagagatcagcaagaagaagagactaacattgtgaagatggatcattcacaacctagataaatagccttttagaaaatgttgagttgattttataaggagaatatatcagtaaagatgtagaagttactggtttgctacaggtagctcagaccagcttgtgagagatgagtttttgatttcccaggaatttttcaagctggttttgaaacagagccaatattaaaagttacatcatagaaacttggatagaaacttacacagatagtatgtaacttagtgatggcttgaaagcaatttgcatttagtagaaactgtactttgggtacccatacaaacattctgtttttcactttcagtacagtagtcaataaattacctaagatattcaagactttattatcagataggctttgtgttagatgattttgcccaactgtagtctaatgtaagtgttctgagcatgtttaagttaggctaggctaagctatgatgtttggtaggctagatgtatgaaatgcattttcaactcgtgatattttcaatttaaaatggattcattgggatgtaacctaataaaaacttgagcagcaactgtatttgaataaattacagtatacagaaaaggcaatactcaaaactcatcacgtcataataactgtactatgttttaccattatctatgctttggcagctatttacatgtattgtgtctgtatgatgacaactatataatgaggtgctactgcacatttctttccaaacctgcattctataatgtgatgttggtggcttgaaattggctttccgctacagtaaccaaaacagcatggtactagtacaagaacagaaacatagaccaatggcacagaatagagaactcagaactgagtctgcacacctacaaccatctgatctttgacaaacctgacaaaaaagaagcaatagggaaaggatttcttatttaataaagggttgggaaaactggctggctatatatagaaaattgaaactggaccccttctttataccatataggaaatcaactcaagtcagattaaagacttaaatgtagaactccaagctgtaaaaatcctagaagaaaatctaggcaataacattcaggccataggcacaggcaagtatttcatgatgaagacaccaaaagcaattgtgacaaaagcaaaaattgacaaatgggatctaattaaagagcttctgcacagcaaaagaaactatcatcagagtgaacagacaacctacggaatgggagaaaatttttgcagtctatccatctgacaaagctctgttatccagcatctacaaggaacttaaacaaatttccaagaagaaaacaaataaccccattaaaaagtgaacaaatgacatgaacagacacttatcaaaagaagacatacatgcagccaacaaacatatgaaaaatgctcagtattactaatcattagagaaatgcaaatcaaaagcagtgtgataccatctcacagcaaccagaatggttattattaaaaagtcaataaaacaacagattctggcaaggttatggagaaaagggaacacttttacatgttggtgaaagtgtaaattagttcaaccattgtggaagacaatgtgggaattcctcaaaaacctagagagagaaataccatttgacctagcaatcccatttggtatatatccaaaggaatagaaatcattctattataaagatacatgcacgtgcgtgctcattgtagcactactcacaatagcaaagacatggaatcaacctaaatgcccatcaatgatggattaaataaagaaaatgtggtacatatacaatatggaatactatgaaaaggaatgagatcatgtcctttgcagggacatgaatggaactggaggccattatccctagcaagctaatgcagaaacagaaaaccaagtgccatgtgttctcacttataagtgggagctaaatgatgagaacacatgaacacatgatgggggaacaacacacactgggtcttgtcagagggtggggggtgggaggagggagagcatcaggaagaatagctaatggatagtggccttaatacctaagtgatgggatcatttctgcagcaaaccactctggagcacgtttaacaatgtaacacacctgcacatcctgtgcatatatccctcaacttaaaagttggaaataaaaaaataaaaatgaattggctttccatttacccctttgattgcccttacccctatccatatgtaaagcagcagcagggtggtgattctgaatgtttcacgggagcagttaaaaagacacaatgtgggccgggtgcggtggttcacgcctgtaatcccagcactttgggagactgaggcgggtggatcacctgaggtcaggagttcgagaccagcctgaccaacatggtgaaacttcgtctctactaaaaaatacaaaaaaacgaccaggcgcagtggctcatgcctgtaatcccagcactttgggaggccgaggtgagcggatcacgaggtcaggagatggagaccatcctggctaatatggtgaaaccccatctctactaaaaatacaaaaaattacctggcgtggtggcgggcgcctgtagtcccagctactcaggaggctgaggcaggagaattgttgaacccgggaggcggaggttgcagtgagccgagatcgtgccactgcactccagcctggtgacagagcgagactacgtctcaaacaacaacaaaaacaacaacaaaatacaaaaaaattagccggacgtggtggcggatgcctgtaatcccagctactcaggaggctgagacaggaaaatcacttgagtctgggaggcggaggttgaagtgagccaagatcatgccattgcactatagcctcggtgacaagagcaaaactctgtctcagaaaaaaaaaaaagaaaagcaaagaaagaaaaggcacaatatgtaatgctatttgctaaagtcagcctctttatgggtcttttgttgacttcttctttagtggctccacttcttagaagttaatgagcaattcctgctatagcagcagagcctctaccaaagcagggggacttcagggaaccactggttgtcagatgtgctgggcgtgaacatgagcgtgaacagaggaaaagtgtctgatttaactggtctcgggtgaggcctgcatgttgggatgtttagaggttccccaatgataactaataagaagccaaggttgaaaaccacatctaggccaaactgcgattaatttttgccttccacctccttatcaatgtcctctttcccttatgaccccgctgcctacctgactcagttgcgtccactttctctgtgaatcttcctttacctccacgttggctgccagcttcaagattgcatgcccctctgagcagtttatctctaaccaagagaggtattcctttccaagagttccattaaaagtccaaaggagaagttaattggcctgactttggaccatgtgtgcccacctctcaaccaatcactgttatcagggcagtcatccctttgtccagccatgctcctgtatcagagaagcactgccatgacagatattgggcaaactgatatatgacccccaatactgggtttggtgctcattcttgttaatgcatgtgttaagggtttcattctaatcatctgcaaaaaagtgattgttgtctttaaaatgttaccaaaactagtcttttagcaagaatcttactagaataaaatggctcttgctacctgtatttttaatcagcctatgtatattgatcccattcctgatattatcaccttaatatataacagccccaattcctcttattgagcattggttgctagggaaagcaaaaagttaagagaaaactactgagattttctctctaatttgcctctgtctgcctctaactagcttagagatcttggacaagtcctttaacagttctctgtcagctgcttggactgtgaaatagagataaaagtacctgtctatttcaggccgggcacggtggctcacgcctgtaatcccagcactttgggaggcccaggagggtggatcacgaggtcaggagattgagaccatcctggctaatgcagtgaaaccccgtttctactaaaaatacaaaaaattagccgggggtggtggtgggcacctgtagtcccagctacctgggaggctgaggcaggagaatggcatgaaacccggaggcggagcttgcagtgagccgagatcgcgccacggcattgcagcctgagtgacagagtgagactccgtctcaaaaaaataaaacattaaaaaaaaaaacaaaaaacaactgtctatttcatagaggtattgtgaggattaaatgagataatgttgatgaagtaattttgaaaagcatatcaatgtgcagctgtaaagttttattcatatttaccagccaggcaagtagtattagctgttataagtaaaggtaaacatccaagtgcatatgttcagatgattatttttaatatacattttctcctgatatatattcttctagttgcagatctgattgggttgtatattctgtctttgctaaaacagaattgtatcgaaaatcttaaaacgatttttttccagtgatcattcctaatcattaagtgtgatgtcaaaattaaaacaaaaaaatatataaaaccaaaatgcattcatatgggaatatacttaatttattttccaaataagctcaatggtatttgggagactatctctcatttgatttctataacctttgaaacaagtctgctgacttaactttctcagcctccagagcattatctctgtcttgtctgcagagagattttcctttgaggtcaatctctggatcttccatggtaaaactccttttgccattttctgtgctttcctcttgagtttcctgagcactgaacacacatatatatgtacatacaggaatgcagggacataggccctcacatacagtgcaagtcacattttataagggtaatttgttaaatggtatttctctaattcttaaaagcagtgactcaatgtattattctaacctctttcacctaagagttctgatatgtagctgtaatccaataaatctccaatgcatgattgaattagagaattttttaagttgataagaagttagagtaactagaaaaaaaatgggtcttttattttagattaatagagaaatttgcctctgtattaatccattttcatgctgctgataaagacatacctaagactggacaatttacagaaggagttttattggacttacagttccacatggctggggaggcatcacaatcatggcaaaaggtgaaaggcacgtctcacatggcggcagtgcagggaaactcctctttttaaaactatcagatgtcatgagacttactcactatcatgagagcagcacgggaaagacctgtctccatgattcagttgcctcccaccaggtccctcccacaacaagtgggaattcaagatgagattttggtggggacacagcgaagctatgtcaacctcattgactgaacgtatttgctaaatatactatataccaggtatcaagctggttatgagatttatcagcgaagacgacaggtgctgccttgatccacattgaagtagacaaacaacacattaataaatcatttcagtctgtgatcagagctctaaaggaaataagcaaggggtgggaatagaaaataatgaggaagacttaatttagtcagtatagtcaggaaggacactcttaaaaaatggcctttcaactgaaacctgaagaaatagaatgaatttgctttgcagaaacctagagggaggacatttctgacagggggaaagagcaaaaaagtatgaggatttgcaagaagagaaaaggggaaggaaaatttgtggcttttatgaagcttaaaataaatagtgggtactctattattcaaggtctttcagccaggttaaagaatataaagaatagtgagaatctagtaggtatttagtaggggaatctcacacacacacacacacacacacacgtacatctataataagctaacatgttataaaaagtacaggacatttcttaaaaatatcctgtaatttttataacattagcttattataaatatggttattggcatggcaaggaatgccagtattttctactatcttttatatgctgctgtacatattttgatgtataccagttgcaaagccagccatgtaagttaaagtggcataattgtaaaaaatctaaaatgtaatgcttataatgtgcttggtattgttctaattgtggtaagttgcattgcatgttttaactaattttaattatcacaacaagcctgtgaggtaagtattgttttgttaccatttcatagataacgaaactgagtcatagagggattaggtaaattgccatgtcacacacatttgtaagcaagggatggagccaggaatagggcaggtcagtgaggctcaaatcccatagtcaaaatcagtggtattcaaagtgtagtccacagattgatgccaatttgtgaattatttgtcactagtctatgataaatacagaaactggaagtaaatgtgtgatgattggccttgtcctattgaaaaacctatagaccactttgagtgtagtgtggaattgcatgggacatgaactacatatgagtcaggaactgtaggaacacatttccattcatgatggattggagataagtggtgcttcacctcagataattcaaaagtaatgctctaaactacatgctgtgccaccgtagatgaaataaggtgttaaatcttctctcctgtgtctctcgatactccatatgatacatcatgtgcaaaaagtgccatttgtaatttgccttgtggaaattcattttatttttttcttacctcttgcacctgtgaggaagtgagtatgagagaaagatccagaaaggggagaggtcatatgaccccctgctctccactggcattgacaagtagtagattgggttccatagtatgatagtcactttcctgcaatcattcttcaacacctctggaaattgtgagcctgtaagagaagcaaggaagtgtaagtgctgaatacttatcaacatcctacctggtcaagtggtccagaaagcttgagcatagtgttaaatggaccaatggtatgtgctaccttttttctctactaaggtaataatgtactcttctagctgtaacctaccagcctacagaaatggggttggttttgaggtttggatagatccctgtactgttattatcctgaagtaggggtgggggatgctgaagagagcttcacagtgccatctttgtatgtaaaaatggcacaattatcctcaagtgaagaaataatgtagaaagagctgaagtagtgctttttctaccactttgcagaaaattagtgtcagcagcacattattcagaaatctttatcttttaatctactatgctaactcttatcatatctgcccctgccctattgctttaactagagaggtttattttgttcccttagctaatgactctatctgggtcagacatcacatatgtggcacctgggtggaagtgctgagttcatttttgtctttttgttattgttattaacatcacctcatgtgtttggcattctgtgttggctgtcgaaccagattcctcttcctttcctgaaagaaaacagggcctagcataggaacagcttctatctttctttccttccctgtatatctctttctttccttccctgtctatctctttcttttttccttaactggggaatcaggaaacttctgatgaaaaatcagtatcatagtgttgagtaaatattgtgagtagacaggcatttccttgcagttttgaatagaatcatacccctaataaagacattctgaaggcttataattctcacaaagtccagatgtttctacaaacaaggcaaacatggaggtaaaatgtggaatttttgaaagacgtttagttcccatgttgtcttagtcaaaaacaatgaaaatttcatttccagttaaccatcaactaccttcagtagaagactaacatcttccttgggcagtttgcttcatggatagtaaatggaggcagagagcagttattctgcagcacacaatgccatgaatgctcccacatatgtaataatgtatatgtaaaagcatggatttgtgcagtattgatttcttcctcaacgcttactacttcctgcctctttggtgttgcaaggttttgtctgttgctttagtatttaaattgcctcacttaagaaatgtgcccattatgtgtgggggagaggaagggttccatgaaaacgaatgctctgaagtatttgaaattcttctatgagcaccgaagcactgcaactcacactgctgtgttcaccaaaatcctggaagcaacacgctgttttgacttgaagaagcaataccaaaattatgaagtcatctaacatctttccaattttaacacagactctaaatatgtggcaattcagtattttatttttcgtttatatcccctttctatactaccaccgtttaaactaacaaagttgttctttacagttttaatatagaatccagagatgagacatcctggatttgttattttttctcctatttctttttataaccctatttaagcaaattaacaacatctgggttgattaatgaacaagccacacatactcataggctcatctgtatgtacatattatgaatgacgcctctgatcaggaaatcaaacaagcaaatgagaaaacctgttcacttgttcaatgggtcaggtgtaactgtcaaagagcatgacttggggaaatatacccttcatctgtgctctggcttttcaggccccacaagcagcctctagggcaacaaggtcatagatgatgtattctgttaaaataacaatgccttttattttaaggacactacttatactgggaaggtgatcttttccaagatagcaattaccaatgtgaatccataaataagttaaaaaattatgttttttgatcataagaattgacacttgagtggaaatattcctctgattagactagcttggtttctctcgtcacttgtctatgtaggaagaattacaatgcagagctgtcctttttgattttgcctctgatattgaatgcaaatattttggctatcagtctttcctaatgctacttaccccttgaagatggggagaaaagctgaagaaagctatttctgtaatcttaatatttcttccatgacacttgtaaattgatttgccaagaagggtaaaaaaaatcaatgcagatggctagttaagtttattgtggttcagactcaaactgttgtatgtggatgtacacttgggagccaaggaatagggatatattgttagtgtaaaatatccagttccatactaacttatgaactcttttaggtcattcatcttattcaacttcattccctggcacctcacttagtacctggcaatgtgttgtagtagctaagaaaatgtgcgatctggactctgactatccaggttcaaatttttgctcttctacttactaacaatatgatcctggatcgtaagttttcagtgaccgtaagttttcagtgtctttagctgtaaaatgtgggcaatactattatttaactcatagaattattataaagattgaaaaggcaaagtgtgaagtactcagcccatagtgagcaaccagtatatgttaactatacgataagtatttctttactcaccaaattttgaaataaaccattacctgaggtggttggtaatggtgaaattataatggaagagagctgggcacagtggctcatgcctgtaatcccagcactttgggaggccaagccaggtagattgttttagcccaggagttcaagaccagctggggcaacatggtgaaacagcatatctacaaaaaatacaaaaattagccaggcatggtgagatgtgcccatagtctcaactaatagggaggctgaggtgggaagatctcttgaacccgggaggttgaggctgctgtgagccgtgatcgcaccactatactccagcctgggcatcagagtgagactctgtctcaggaaaaaacaaacaaacaaacaaataaaacaattatagtggaagagaatctgaacatgaagatggaattctaaccttgcttaagaagtaaacatatacaccaataataataataataataagaagaagaagaagaagaagaagaagaagaatccagaaagactccagacataggaaataacatctgacatgatttgaaaaagagtagtgaagtgaaatagaggcccacagctcctcttttctggtataaaactttttattgaaactacctgtgtcgtaaaacagggagagaagttttgctaccgataatgataatttgatgccttaactgtattaatatagcaagtgtgactcaaggatgtctggagtctaaatataaaggtctgagaagagacatgactgtttcagaggtttagagtggtaaagccaataagtggtttccggccttcccaggccactccgcataaagcatcctcactccctgagggcctctgacattcctcagtgttgtgagcggggaagagagaaatgctttttggttggctcagattaccttgttctggttaaatgaaaaagtattaacatacgtttcttgtcaccacaattccagctgtccaagtcagtgctttcggagcagagatgtatgatcttataactcctgaggttaaaaaagaaatgtgttgccgaacaaacctcctcatctttgacaccctgtttcctgcctgttgtgtgtgacaggaaggtaaaaaggtaaagactaaacagtagatactcttcagtgagtggttagtccagcattacctgatggtgtttagtatttgccattctgaaagatgatcagaaagcaaaccccttaaagagaaaaattaaccagtttgttttggcaggctattctggagcacatgctaaagtgaccacagttgtttttaatgcccagcagaccttcgcaactaatcctattaccgcaggactcccaggactgtctggttagcactccccacagatttgtccactcccatttctgaccccacaaccaatcccttcccttgggccctctggaactcggtcatacagaaaatctcctttatcctcaaattttcctgaattttttggtttcactgttttactcaaattcaaacttggataccccagaagacactacttcctctaagccacctcaaactgggggagcataactgctggtgccagtgggccttctttattgtagtttcagatcattctcattccatcttctgtgcaacccccctctatgagtctcgtgggtctttggactatgtgactcactacctctccttacttgattcactgtatcccatactgaccttgccatattcttggaaatttttgcaccgtggcctctccattctttggcttcttctcctccattgattttattcatattttgcctcagccacacatgcaaaggacatatcctagactctctcattaccaattactaaaaacccttcataattcctatctcaggcatcttacttttgggtcgtttgttcctattttagcagctcaacactttgagcattctgataccaacactttctttaaatctcattatgaactatggcatctattattttttctttgttgctcattttcctcatgtcccagcatctctttatactctgcttagatttcgtgaaaagccattatttcatgaaaaactgttccaaactaccaatgtctgtatccttataccgttgcttatataaactcgcttgtccctctctcttctttctttaaatgactctggtaaaatcctaattatggtatatccaattgacttttgttttacctgcatgtacacacctgaacagagctggagaaaaacactctatcctgcttaacagtctcattttaacagcatgaccactcgcttaccttaagtgggttctcggtgctgccacgcaacctattatatttttctagtctatttattctcccattccataatgatgactattttgtacattttctctcctttctgcctttcaatatttattccagctgttaactttactatttcattaaaaacagagaatcaatggaaagagaacttcaaaatgatcccactataacacctcccaacccttccatactaccaacatgtatatccttatactcttctttctttcatgttactgtggatgaatcatgagggtccttcgtagcaaagatcatctcttctacttgtgcactggatcacatacctcttctgtatacaaagcagcaattgttgctctcctgaaacatcagttatgtttttccttttcaactgaattatttctaccagcatacagacatgctgcaatgcttcccatcttaagagaaaaaaagctcttggctccatttcattttcagtgactgcctaatctccaccccattttaaagcaaactcagtaaacgagaagtctctactcactgtttccacttcctttcttcctgttctctcctaaagccacttcaatcatgttttcatctccactactcgagcaaaatgatttttgtcaacgtcatcaaagatctttatgttgccagatccaatggaccattcccatttttcattttactttaaaatcttggtaacatttgatacccttgatcaactcttctttcttaaaacttggattgtgagacagtcttctcttgtgtccctcattgcttaccggttaccccttctcaatctcgccagcttgatttcccttatttcaattctaggggattctggcgcttagtccttggatctctggatatctttatcttcactcatttctttaaggagcatatataaatttgcttctttaaatatcacctatatcatgatgatcctcaaatttgtatcactatggttgacttctcacctgaactccaggttataaaaaactaaaaactgcattttcactttggatgttaaataggaattccaaagttaacatgttcaaaacaagtcattattttccccaaacctgctttactttcagtcttcacaatcacaaagaaaaaacaactccatccttctcactgatttagctaaaactttgattgtccccttttttctcacctgtcacatagaatttttcagcaaatatcaatggctctacttgactgtttttcacatttccgtctctgtaatcctggtccagacctacataattgcctgcctatggtatggcaatacatttttaacagctaaacctgcttatatccctgcctccccacaatctgttctccaccgtgcagccagagtaaacgttttaaaatgtatagatggccgggcgcggtggctcacacctgtaatcccagcactttgggaggccaaggtgggcggatcatgaggtcaggagatccagaccatcctgggtaacacggtgaaaccccgtccctactaaaaaatacaaaataaataaataaataaataaaatatatataaattcatgccatgcttttctgctacaaaccttccaaaagttttggatctcattcaaagtaaaagaagaagcttttgtaaatatccacacaaccttgcttctcttctgtgttaccttcttctctcctaatttactgcattctaacagtgctggcctcttacctatttcttaggctaagagaacccaaacatttttcctaccactcccaccctcatttatctgtttggtttatttattcaggtctctgatgaaatgtcactccatcagaaataacttccccaaccaaactgtctacacacacacagacacacacacacacacacacacacacatgtgtgtgtatgtatatatgtgtatattaaaaaatacatgtgtatcaccactccctttacccctagcttttcatatacctttacctgctttatttatctccatattctaaaatcactcaggatagagaaataagcggtttgcttgttgtctgactctctgtaatagaatgtcagcttcagaaaagtataaacttctgtgtgttttattcattgccagatttttagcacctagaagagtccgtgatatatagatgcaccataaatatttgttgcatgaataactcactgaataaaggtgtatgagcttagatttgactgtttatctttttttatcactgcactataaaacccaagtttggtttccaggaaggccacgttaaagaaacactgtaattagagagttagataatttggcattgaggaaacaccactttgccccccactgccaatctgtgcactggcaaaattttttttcttttttgaggcagagtcttgctctgtcgcacaggctggagtgcagtggcgcgatctcggctcactgccagctctgcctcacgccattctccgcctcagcctcccgagtagctgggactacaggcaaccgccactatgcccagctaattttagtatttttagtagagacagggtttcaccatgttagccaggatggtctcaatctcctgacctcgtgatccgcccgccttggcctcccaaagtgctgggattacaggcgtgagtcactgcgcctggcccaaaatttttctgttgcaatgagatactactattttcttacagaaagagcttgcagacctgatgtctccctcccatttatgtagacacatcatcaggcagtttgcctcagtattgatttgagaatttgagaggaatcatctcttgattttttaaaatttaaaagttttatttaattgaatccttttggagaattatcctaccttaggaaaaatagtgaagacataacagcagaatcagtttggtgctccctctagacaagcaaaaaataaaagtgtatggaagatctgactctcactgtcttctcttcccctctgattgcccaggtatatctcttagccatgggttctcatttttcttctttgccattagtttggcttttttattttctctgttaacacattccacccttgagattgctgtaacagtgatctcaacctctgataaggtaagtttataaacttaatgaggaaaaaatggggaaaaaggtcactcttctgctgcagaagtgcgcttggcttctcttggtttgctgcctattcactggcattaagtacctgaacaaatgttttatcacagacagggaactgttgagggatgttcacaatgcattgaacatccttaggcataatttttatgtgaactgggcatccttaaatacattctgactccatgatcagattaccagaaagtgcaggtcccactcactatcttgattcagcatctcccatctggccaaagttgaattttacattgagttggatggtgataaatatgcttagcaaaagtatattcgttgtttctgaagttctctgtgctgataaacactggctgggactagggaagtgggccccaaataaaacaatagcaataatccccagactgcttgagtagtggcagtctttattcttgttcactaaatggaagttgtagtttagttttatttctctcataaggctctgctgtttgaggactcagctttggggccgttgagtgcttattagtggtagctccagaattgcttcatagaggtagaaatagggaatggggcgggggctcctggtgggtggaaaaaagggtaagggactgctactgaaagtggtcactatactttatttagattttatatttgtttgtgatggctttagtagggattgataggcagtgcatgtgctgatggagataaaagaggctctaaaagacccctcctacaaaaccccttgataccactcctgtgaaaaacatcaagttttgatttttgtttgcatggctgttatcaaattccattttgaatgagtaacaaagctatgggagactttttaaactcttttgaaaattgaagattgtaggaatccccctttccccatctcttctgcctatgtagacatcttggggatttccaaattcaagataaaatgttattgttctaaaataaatagatttggaaaatgtggttttgacactgtatttaccaaaaaaagttctattgctacatatttaaagagatattttattattttaaaaagctgcatagtcaaataagctgggaaggccctgactatcaatgcatttcattaaatctaagatgcttttgattataatatagactgttttaatgtactcctaagaaaaatatactgccaattagactctgcttctactgtaagaagcatctccatatcaaagtttatttaaaaaaaaaatgaaaagacatgcctttgaatttatgaaatataatatatacaacctttctgaagagccccatggttgattagtgtatcttaggttctgagaaacactgcagtaaaaatatctgttaagatttctttaaactagcatttcccaaaccacctgattagccatttgagtttctatcacaccactctgtctcataacatttgttagaatttctttggctctttcactgccaagttgccttaatgtgaggaggcattgaaaattgggattcacccgtaactcactgccatgcccaaggaaggcattgctgctggaggcgtagtggacattaacactgctttgcaagaggagctgaagaccaccctcatccatgacggctaccatggggaatttgtaaagtagtcacagtcttagacaaaagccacgcccatctctgtgtttacattcaactgtaatgagctttgtatgtcaagttggtggaggccctttgtgctgaacagcaaatcaacctaattaagactgatgacaccaagagactaggaatcgatagtggcagaaaccccaaaaaaatggttagttgcagttgtgtagtagttaaggtctatggcaaagaatctccggccaaccatgtcattaaagagtgcttcaaatgccagaaatgaacaaataaaatgttggctcaaaaaatttgaaaataacatggaatattatccaatacaagcatggcaaaggcaggctatctattgaaatatttgaagaaattctgagaaagaaaagaaatgaaagacaaacttgaaaaaaaacagatggagcaagccaggtagaacaactgttaagaatccagaaaaacaaaaatcaaagaaactattctaaacaagctatcaaatttgtgtgacaaactgtgacttcatggagaagagttcaattagaaaaacggtggaaaggagattaagactttgattggtgagagtttatgaagactgacacaatttaaaaagctattatagttattaatacactcttagctataagctgagagtattcctagcatgctatttaaatctgacatcaggcaacaaccaaaattatatttgtgtaagtcatatgggaagggttagggagggagacaagtggctcacccttgggaaaagatgttcatatcaactttgcagtctctactttcttatctgtaaagtagggatgagcaaaattgaacaagatatttagttttacaaaaatagtcacccatattatataaaaatatgattatttttgtaaaactcaatacagaaatggaaaccgatgacatgcaacccattgacaattaaatgagttgtatgagattgatttttaacataatagaggaattatagccatgataaataaagttaaattaagaaaacgtagaggcctggcatggtggctcacgcctgtaatcccagcactttgggaggtcgaggagggtggatcacttgaggtcaggagttcaagaccaacttgggcaacatggtgaaaccccatctctgctaaaaatacaaaactgagccaggcatggtggcacaagcctgtagtcccagctactcgggaggctgaggcatgagaatcacttgaacccgggaggtggaggctgcagtgagccgagattgtgccactgcactccagcctgggcaacagagggagtccctgtctaaaaaagaaaaagaaaacgtagagaaaaataaaaggtaagatctattgccaaatatatataaaacatatacaaaccaaatgaatatgtgtatgatactacctgaaataatcttattttttggttacttgtttattccatctcatccacctggaaaatatcactcatgagagtagactttctttttttcatcactttatcccagctcttatggttagttcctggaatataggagtcattcagtaaatatttgtaaaatagttgcaaagtaaattaatacattaatgaaatataatttaaccccaccatttagtacttattataatttgatactgtgtcctccttaaagcttttaaacctttgcttagtagataatatttttctctggaattttttaaaattgcaaataacaaaatattttaaactgcaaaccatgattctacagtggagagaatgttaaacacacagacatacacacagacacacaaacacacataaaaattgccttaatatgattggtcacagttatacatctatgatggcaaggatgacagaagagaatccactgctatgttgggtcaggtgaaaagagatcatgccagtcacttcactgcagttgccctttgccacattataagatggcatagtgtctacagaaaaaaaaaaacaagaaaaaaaggaagacttatcttctccctgttacaatttttcacctaaatgtcagggtcagattcaccctgctgaattttttttcctcctttctgtgaaagagccactatttccacagattgctttaacaatgagtaaacttttgctggtttatgtgtgaaaactacactgcaaagtaccttataatgtgcttaactattagcagaacataaccttttctatgacttgtaatataatatactgtgtggacttatgacagatatagcccatctctattataaggtccattctgtgacccagaaactattttggattctgagagtttaaaaaatgcatgggactacctgccaggaactcatggtccaggatatgataccaatatgaaaataaatacagcataatgtattaaagaaaaggaatgaggcttttgaaatttttataaatacagtacagtgttgaagaattaaagaattctggcagcgatggcttaagaggtgtatattccaaattgtatgcacacacacacacaattaattaattttgttattcaatggaaaatcatcagaaggagaaaatgaggactagtggatgatgaactacccagatgccacttaatagtatcatatttaacaaaaccaggcttatgacataggacaaaaactctactgattctattaaaatataagtcaggttatgtgactcctgtgccccaaactatcgggggaaacagcccccagtatttcaacgtaggttcttttctatttttccctaagtgtcgaccctaagtgttgagaagagaaagagtacaaagagagaaattttacagctgggcctccgggggtgacatcatgtattggcaggttccgtgatgccccctgagccacaaaaccagcaagtttttattagggatttcgaaaggggaggtgggtacgagcagggagtaagtcacaaagatcacatgcttgaaagggcaataaaagatcacaagggcagagatgcagagcaagatcacaaggctagagcgaaattagaattactgatgaggttccatgtcccactgggcatgcattgtcattgataaacatcttaacaggaaacagggttcgagagcagacaactggtctgactagaatttgccaggctggaatttcctaatcctagcaagcctgagatcactgcaggagaacagggtgtatttcatcccttatcttcaactgcataagacagacactctcagagcagccatttagagactgccccctgggaatgcattcctttcccagggttatttcttgctgggaaaataattcagcaatatttctcctattcgctttctgcaagaagagaaatatgactctgttctgccccaccccgcaggcagtcagactttatggttatctcccttgttccctgaaaatcgctgttatcctgttccttttcagggtgcccagatttcatattgttcaaacacaaatgttttacaaacaatttatatggataatgcaatcatcacagggtcctgaggagacatacatcctcagcttacgaagatgacaggattaagagattaaagacaggcataggaagttataagagtattgattgagaaagtgataaatgtccatgaaatcttcagaatttatattcagagattgcagtaaagacaggtgtaagaaattataaaagtattaatttggggaactaataaacgtccatgaaatcttcacaatttatgttctttgccgcagcttcagccggtacctcctttcttggtccctgacttcccacaacaccaaaccatttaaaaattctcctaagtcctcacagtggcctctaaggccctctgtgatctttccaggcacccccctgtctttgattgcctctcctgttacttttctggttcagactgcttcagccacagtggcctctttgccggacctcagatttggcctttcttcaactcttttccactccgcattccacctgttgggaacactctttcctcacatagccacacctccttccagactttgttcaaaagttcaatcgagtctgctctggccaccccacttaaatttacaaactgcctctctggcccctttcagcaatgccacctcccaatctcccagtattactctgtttagttttatgtatgctgggttgggggggttaatctgtaaagaagaataattcatgatctgttcaaatcctcattaccactttctaatctgaatgtgaaaagcatcaggagccagttatcaaagtatccctctcctctccattgctagtcattttctaccacaagttttttctagccaccattggaactaacctacagcaaacttctggaattaggtattagcttgtcaactgacaatacccacaaggatgtgcatctgaaatttgtgtgtgagtgtgttttatgtatgtatttgtaaaacggcatgtagggtatggggaaaacactgggtcagtggtcataagaaatacttagggtcaaatccccatctgtaaaatgggggtaattcctgttctacctaatgcacagaattcccattagataaaaatgagttagtgtatgccaaaatgctcttaatgctggagagtgctatgatgcttctccatcattgtcattagagctacatttaagcaaatgcttacatttgataacaccttatatctttataaaatgttccactttcaaaagcaataagcaagtaaccattgttttcaagtgaatcattgtcttaattttctcaaaaatattgttggcattcttgtaatggttaaattaaaaacaaagacatgttttaaacattaaagatattaatgttaaaatttagattcagagaaggtcagtgacttatctgtgatcaaattgctactaagtaataaagggtgttgagtgtgttttctgctccaacttggcttcccacataaataatgaaacatataatagggtaaatatggatggaggctggaattattggaaatcaaaatacagaaatatcaatggacaaatctagggaagagagtttgatgaggagcaagatatttgcatagttttgaggcatctcttcataaattgctttttagttgcaagctgaaaaattgtaactatacaatggaaacattagataacaatttgatcaggtgatgaacatcaacaatgaggcgcaggtggatatcatgtgcctatggatagaggcgcagctggatatcatgtgcctatggatatgattctctgagaaggacataacataacttatgtatgttccagccacgaatcatgcataatctgaatttgatcacaaggaaacattagataaattcaaaataaagagcattcttcaataaaacaagcctatatttttaaaaaatgtcaatatcacaaaagacaaaaaccaaagacatgttccaggttaagggggacaaaagtgacataacaattaaatgcactgtaactggatgctgtatggcaagatggaaaatgctattattattatggggttaaatggcaaaattggagtactaattctagattattgtatcaatgttagatttactgatattgataactgtactatagtctaatacgtgaatatccttattcctggaaaactcatactgaagttattagggataaagaaccatgatttaccaatttcactcttggacggttcaggaaaaaaatgtttttagatagttagatggacaaataaatctagatctagacagagcagtacattttattaaagtaaatagggcaaaatatagtaggtgaatctagggaaaagatatattcttgcattttctttgtactatttatgcaacctttctctgtttgaaatcatttcccaaaaaaatacttttaaatataatgaggcacagcagttgaggcttctgtttatttgactcatctgaaagagtttattttctttagtaaatacctaacttacaatcaggcagggacgttttctcttgggaaggtaagatgtttcgtgcataaaagtagcaatacagaggtgtttgatatgacaatattttactgcattttcattttttattatttattattaatgaaatgcagttgcctttgtagcctgctgagtgtttaataatgaaattgtgcatcattcattttcaaatgtctgtgcctcgtatgtgttaggaacatgaattcaatatgaacttcaaatcatttcgtaaagggagaactgcagatagagttaaccaactgatgctctttaaatgcatgtttatatacacaatttccaggatgacatggcagattaggagtttgtgtgttatatgtaaagtacctattcattgagcttctggatatatggttttagatatctacttaagtcctcataatatagcatggtttaggaacatgtttcctgtagtctatgattgaatttattcagtttcaaaaactgattatattcttccttaaagttccaaggttctttatgtaaattcacatcaattagttcttaatttatgatggtccgatcccccaaattggccttggttttaaacgcttactgtgttgaatggttctcccaacttttaccattgtactcagcatgttcaatataatacctatccttggctagtttggaatgaggaagtgagactaactttaaccctaaagagaggaacagacccctaagacagccatgtcccaaaactcttccccctcacatgtccttcttctcccatcctttcctattatcctcttcttcttcaacttgctcttcacccctcccccttacagctcttctgttctaaactcctttccattttattttgagatgagatctttctgtgtcactcaggctggattcgaactcctgggctcaagcaatccacctgcctcagcctcccgagcagctggaactatagatgcatgtcactgtgcctggctacatttctctattttagccacaagtgagctgcagacaggtgattccatagccatagggtctcgatctcccatcagtgacagaataaataaaagatgcttccatgatgagcaagtattcaaactatgataaggaaggatatgaaagagattacttctaaatctccttatggcctttgggaaattatagacatagctactctcagtgctgttagtgaatttgcagaatctagaacccagattccttctttacaacttagtggctatatgagcatcataaatcaacctctttgagtcacagactcctcatccatcaaatagaggtaatgatgagatgaattcagaggacacttgagaggtgtgaaatactgtctaagatgctatttatattgtcattgtggccagcagtgttatttctttaatttcacttttagggtagtttacctcttcaacaccaagacagtctttacagaacctttttgactagggagcaggatggatacaatttgtgtgaaggagcttatgtacaagagaggcaaattcctctccctttttctctctggtcatcaggaaggtctcaaggacaagtgtctcctcaactgcacatcctagaatcatgtgccagctattggagtaaataaaataatcttttaactgataaacagatcttggtttggcaaaagtcagatttttctgtgtgtgatttgaaaactcttctgaattagagatgaaaagatctttctcaggtcttccctttggcagagttccagctagaacacgtggtcattgaccaccataactgttggtgaccaggatgtctagaaatgctgtcaagatggctatgcagtgaaatagtgttcttagtgcttacaagatccttgtcatgtgctgcaggtgccaagtgatgcaaaaaatgtttacatgccatgaataaaactaaaagtgcgaacctcaaccagtctatttttatagtggatctacacacaagaggacacttacaaaggagataatgtaatttagctctgggaactcagctttaagaggacgattggttttgtttttatgtgtttttgcttttttagaattttctgctgtacatctgggaaatgcttattgtgagtgtgaatcacttagtagctctcctcagcgtttccattttgatattcccaggctgccagtgctaagcagtgtttctggctgaagctttgaaaaatcattttttcctatcaagccttttctctactttagccctgcctcatttccctttcttgcctctaaaagttttaacttcctttcgtaaattgcagggcataatgacttcaaacaaataaagtccaagtctcaaacagctatggccccacatgtgtgtgtgtgtgtatatatatataagcaaatatgcatacatccacacatctatatatgttttcaaaccactggcttatatcagtaatagtttggtggcaaagttcctgaatttcaaggtggatttcaaaactccatttcttccatttgttggcttaggtacaatgtaattgagcattgtgattaacaaatacagattcttggctataagcaagagcaaatctatctattaagagcttgaaaaaattgaggtttatttgccttttagaaaagaaggctgagacaaatactctaggaatgaattgctactgaaaagttgcaaacatccatggcacttcggctttggcctcatggtctcaaaatagctgccgaacttccagcatcatggcctgattacatcaatgtcctgaattttgcccatgttaaaggcttcagtaaagccaaaggggaacaaaagccaaatatatttgcccactgaatctattaccttgattagaaaagtaatattttttttaacccaataatatctgcttagccaatattcaattatgccttgttggctagaagtgtcataaagccactcctagctaaagcactgataggcaggtagagaagtaaaatgaaggacaatggctaaatcagctaaaactaattgtatttgtcacagatcccaagagaattatagaaaactacatttttttgttttgctttattttagaatggtcaagagataaaaactgtagggatcaaattctatacatgtgccaggttgctgaattcaggtttcaaggatatggagcaaaagtatggtaaaggtgttgtagatgcagaagcagaaagattggcacacccaagcagaatatttggctagagcagtaataaattttttaaatgtctactttccagcccttctggggaaaaaagcttgataaacctattgataaaattaaatgatatctgtatttcattctgagatgaagagttaaattcaaggcatatttatgggccacttactgagttcacaagcactgtgctgacaccacagacattctgacacatgctacaatatgatgaaccttgaggacgttatgctaagtgaaataggccaggcacaaaaggacaattactgtacaattccacttacgtgagatggctagagtagtcaaattcatagagacaaaaagtagaagagcagttagttaccagaggctggaaggagggagaaatgggtataatttaatgagtaaagagttgcgactcaggaggactaaaagttctggagatggatggtggtagtgattgtgcaactatgtggatgtacttaatgccactgaattattcatgtattaatggctgacatggtagattttgtttattctaccacaataaaaaacaaagacaagcagaacaaaagcgaggtagctgcaatcaattgggaaaaggacctacttattcttaaaccaggtggcatagtgaataggtgaaaatggaagttggaaatgaccgtggggatcaacaggttgaaaggatcatatttggttagccaaatggatcttgatagatgttttcaagttttacaggtgaaatgattggggcgatgatgagaaatatcaggaactccatgacacttctaagggagaataagtccactgctttgcctgagtatgtaggatagactgtaaacaggagatttttggactggagagttgagtttggagaataaaagaatattgaggtaaaaatgtaattcattgcaaagttggaaaccatggaaggttttaggataagatcttgatataatcaatattgctgtgaacttaattagtgaagcagtgcaaataatgtgtgggagggagagcacgatacaataacagctcttgattttaactgctggtgtcatatgggataagatgaaacaaaattcaatatcgattgaggcttcaatccagttcgctaggagttgtcccattttctcccaacaggcatacctattaaaaagaaagagtttccagaattttccctcatttattgtcaaaatagctcacattaatattatttaaaatttggtgttttatgttggtacaaaatatgtttcagtaagatatcatcacatcattaatacagtgaagttataaactgttatgtttacctccacaaaaaaaacttgaaatctaactaggctgtcccgcgtttacagtctctgcatttacagcctaacatttctcagaaggatgaagagttttaggacaatatatacctcttcatcatgagaagatatttaatgccttcactggtgcagggctacaggaagggatgttgcttctgctgactactgctttcttaaacttagggcatgttttaagaggaaaagttatagctagactaggttggcttttcatttaaacagtgctagtcgctttggtgtcataaaggagcatgggcatatagaatgacataggtgggaacttctgaatgaagatgggggaatggaatttgccttcttttcaaatactgctgataagtaaaaccaaacttaatttaattttatttaaactttgtgacacagggaagttccctttgcagaaaaactttagtgcttaggtttgtatcattttcagtgttcagacagctgctacgattctttactatcttgtagtcatggctatgatgattaattttttaaaacttgaaaagggggaattgcctcaaattagagaaagacagctttgaacaagttgcccaagagtaaagcattttacacatcaagaatgttagtgaagctgccgatactgtaatttagataacagcaaagataccaagctggtgtgtgttagttgttgagacatgtgggtgattgccattttcagtgttctttattttatgccacagtgttgactttttacattgacggtgatgaaaaaaagcccttggtaatatattgaagactaggcttgtggatatatgcctgaaaaattagtaaatgctgtggccttcaaattgtaagaggctcctatgtaggaaacattattctaatgaagaaaaagcttatctggagtatctttaaccaggaattcaaggtagtactgaagactccaacaaaaccatgatattaagccaaatgcacaaacagctcaattgcccactttagaaatcagtccatatattttaagggattgtgtcttatttgtttttgtattccctgcagattttgtgtgcaataaacatttcttgaatgaacagattaagcagtgatgtaggtttttacaacaccagaaatcaaaaatgtgagtaaaattatctagtagttatgaaatgtactttgacttcctttattttctaataatgatggcaatgagttagctgtatcaatctttacagagatatcttagaaatatttccccatttgtttaagacatattcttgattagaagtataactggtcaaagagctgatgattttgaagacctcttctgtgtagttggtcttgactccaaaatgtagcatttgattgatatagaactagtattaaattttatgtttttcaaggggaggaatgatgttctgtacaatgtttgcattctgtggcacagaactttacatcatataatactgaagctggattgataaagaagaattcaaattgagggctaggatgataaactggagtttatggacacaaaataactcagcagttctaaacagtaggagacaaaaagcacaatgatcatatacaatagttatcttctgtttatactttacttactgagcacttaacttgtacaaggtcctgtagcaactgaaaaaaaaaagtataagacgatcatagaatgatttaaggtaaaagagtacatgggatgtggggctgagctgctggttataaatgaatcagacaagatctgttctcaagccaaataaaagagtaacaaagttaaaaaacaaacataaaaaagtattcatcttctaatttcctatagttcattaagaattgaatatatattgaatatattttcttatcttagcaggaaaattcttgaccacacctaagctaagattcaggtggagaagtcaaaaggaaaaaaactgtatgtaatatagatggacgtatttcttggtttcatttaaggtgcttgtttagatcaaacatgagaagcaccttatgtcactttaagttgagatgtggctgtaggatgcaatattgtggagtgtacaaaccagatttggctctaggaagagttagagccacttgcatagctaactttgccatctttctatcaaccagggaagatgagctggggaaaagccaatctagaacatgtaagaacagcacctccaactttaggcccaatcataaggcagatcagactggaagaagcaatgggatttctaaaaggacattccagggctgttgaactgtcggaatcactggaaagatgatagtgaagtagatggaacaataaattgcaattaaagttggagaaaaaaaacaataattattccttcttttcttttctgtcattattaaaaagtgattgcagacttgagattaaagatttctattaataaaaaagaaattccttgcttctgcttctaatctttgaaaataataaaggagccaacatatttttaaaagtgtaaaaatccatccccaacacagacaatgctatgtagttctgaaactgcccagtgatttctttcttctcccatatgaaacttttgataatagaaatatgaatgactttatgttttgatatcaacattcttctcgagtggattatgtggtatcatcatagattggatgagaacatgaatattctgtacagacaccagtatcctgggcccaaaagggctgatgtccagcagtgctcctcagactatcgaagatgaaaattgaattttcattttcaacctcttgcaggctaaaatgaaatcagacacttggatgacattatgatatcaaaccagcataaaagtttttaagtccttattctcagtttctataattgatcttactgcagactggtcacagttttgagtgggaccaatccgtgaatcacactgagatcactgatttagggttctggctctgctatttgtttttgggacagtggtttacccttcttttccccatttataaaatgaagtgagaacatattacatgattgctgaaatccaatgattctgtttgtattttgatgctattttctttttgctggttaagagacatatgttataggtacagcttactatctaaatgctctttgttaggtccaacttatataaatgagtgaagagcatgttttagctgagagtttataggctatatttctgtaggattttcccttaattgcaacactattttcagagtagtgagctcttttgtttccatcagctactttgaagaaaaatattacttcctgggtagctctggactctccagtgaaaccccttactgccatgccctaggtaggataatcatgatgagttagcaggttggtcttgagtgataaatcttcaatttgccttattaacagagatatgagtgttgggttacaaataggtcagttctgaagatggcaaagtacctgcaaactgaatacattggtttcctcttctctcccaatacctctggtgaaaaagtacataccgaaaatatagcaacaaatatgtgactataaaaattgacaaataatatagtcttgcataggaatttaactgtggaaagattataaagccagactgctctttaaccctttctgaattataatgaatggtaataaaactaggcatggaagaaaacatttatctagagttaaaaaccacaataaccatggataaatgattgtgcttagtcacttcttgcctagggtttatgttttagaatgtgttttacttctaggacccaaacccaagttttcatagattttaaaaagttcttctcaaaagagagttagatattaatgggaaagtcaggtgttgttcatgaataagttatctggaaacttttatgttctctctgagaatccaagagaatcaaaactttctctgagaagacagatcctgcatatcgtttaaccatgtttacgcttttgaatgctaacttccaggctttgtctataatcctgtgcctttgttaaaaaaattcacagacaatttatttgccaggtcatacttttaagaattctttattttgtgtgcctctgagaagagaaaatgtttttccaccactacttctgaattcataaatattcttgcctgtatattattgtttttgtggcaaatcagggtacattattttcatagtggatatccttgattgttggcatactgtaatgccatttgccacatacgtggctgtaatgtggctttggtaaggtgggaaggagagaatatgtactaatcaggtgaatgggtcacacacacacacttacgaacttgcttaactgcatcttgctccctcagtctgtaaattttatggctattgttaagctacctgcttcatttctcacctaaaacatgggggaaaattcagccattttatctatacttgcagttattctaaggtgagcttagtgacctagggattgatttagaaaatgtatttggttgttttggttgtatgatttgccactatctgggaaaggtggagaggctatgcaacttttgaatgtatttgctatctcttaagaggtgtattggattggatagattgaaacagtacttgaatgtcctcacaaaaattccaactgaacccacacatgatttttcccctgctgcatatcctaattgttacattttaaagaactaacataatttctggagtgtcttccagagagatgcaaataaacacccagactatgtttaacaaaccttaaagttatactgtcagtcattgtgatgtttgcctagaggcaaattaaattaggtatcttcggtgcaattctgaaggagacattcattcagcatcgagatctgctcttgatgtgttaaatggttgtggctcacagttgtgctgtctccaaattcattctgttgagactgaccttaagataatgtaaaaaagcaattagttttaaacagtaggagtgccaacagtgtgaaagaaacaaattacacggtgggatgatatttttagtgatttttaaggagattattaaaaatgaaatctgtactaaaagctatgactgtagcttttagtcacaaaaactgacacagagcaattcatttatttcaaactgctacaactccctgaatgacaatccaagcccctttctatgtctggctgaaaggtggtctggctcattaaaccacatcacaactcccctgaataatcaagccaaacagtttttacacatgatttgttaagttctactcctttgccttgtcattcaatatttgagcaaatatttatagcacacatatcatgagccaagactgggcttgatgttgaaactgttttttgtaaccctaagctaaaccctgaactgtgttaaaaaatacaagtttatatgcacatacacatacacaaacatatatttatagtttaatactttttttcattaaactaattttttagtttttgttgactactttcagttagaaatcccaaaatattattttactcctttgaaattgttaagtagtaaaacaatagttaaaataggcagaatttttaaatttgaaaatcaaatttgttgtctgcatcacagtcacttacctatatccaggtttctttggccaaggaagaaatgaccttaactttgtgagttagattactatttttaagctcatattcatgaaacttagatgcatgctgatctccttatagatgggtctccaggttgaagttctgacttgatgcagaagctatgcaatacattttgtagaatcaatgtacattccaatgcagttcagtgataaacttaaaaacaagaacaatacaaatgataacaatgaccaacaatcactgcacacttgctcactgccagggactgttctaaagtggtttaacatctgctcagttcactggattatcacaactgcctaagaaggttgatactggccttattctcagttttcagacatggaaactgaggcacagagaagttaaataacttctcccaaagtcacctgactagcgactgaggtgtatgtacacgaccttggcagtcagtttcagagtccccatttcttaccgctgcattctgtggctgaacattaagggtgatctttcttatcaatctactcatgataatttggttaaaatatacatagtcaaaaatcttagtcaaggcagctacattatgcttataatttgatttaaatatgcatattatataataaatgcaatgtgattaaattatgtagagtcaaataatcttaatatagaaagctgttttcagggcccaaccatttagccaggtacttaaatgtttctatatctttctccctcttccctctaacagatgattgagttaggcttgagcattacacttgcttctgtggctgaaatgccacatatttctgccctgttagcacagtcttattttacagtcaatgcaaatgattatccccaaagcttgtctgaataaatcaatatcatgaagttatgctgttgtaatatttttgtgcataaatattctaacttgactaataatagaattcacactattaatgaaaataacattagtaaataaatattaatatccttaagagacattatggaactcagaggagagcagtcctaatttactcaattttcaaagtcattagaaattaggaaaattggctgggcacggtgactcacgcctgtaatcccagcactttgggaggccgaggtgggcagatcacgaggtcaggagatcgagaccatcctggctaacacggtgaaaccccgtctctactaaaaatacaaaaaattagctgggtgtggtggcgggtgcctgtagccccagctacttgggaggctgaggcaggagaatggtgtgaacccgggaggcggagcttgcagtgagccgagattgcgccactgcactccagcctggatgacagagcgagactccatctcaaaaaaaaaaaaaaaaaaaaaggaagtaggaaaattatgtaaataaaatgtttctgtttaatgtacattggaatcacagatctcttttgacttaagtttttgattaagcacttaatctgtctgtgcctcaatttcctcatctgtaaaatatttggaacagtgtatgacataccataagcactataaaagtgatggtttaggaaaaaaaatctctaagggtcaagaaaatgtatgacctattctttgtacttaattgttacagaatagacatttgataatggtctttaaattaccctgtacttttaggggggttatatgtcataggcacagacttctgactctctaatgtcattatgatacactttttttatatatatattttctttctaaatcataaaatgagtttacagcagcagaccccagcttttctgagaagtacctacactgttatattgtgtaatcgctgtaccaactaatatttttcgtcagaatatgtacaatacagagttgaagaatctgtatcaaaatgatcagctgtgatgagcctgagctagagggctttttcacaaagcatgttttgttctctggtgaacttatattagaccatggctgccaacttaaaattcctttcttttaaggatgcaatgttgcataattagtctgctattgcagtcaggatgcttgcacactttattttactcctggtatagaatgcaatagactatcagagttgaaaggaacctctgagaccatctaattcaacttgctcgtaatatagatgagaaaacagcctctgtcagttttaatgtcgcacagcaagttagctgtccattagaatctcagaaataagtttcattttagaaaatctcagttattttctgtataacaaatagaaatagataaaaaaaagtagctaaaaacaataactattttttctaatgattcttttcattgacagagcaggcctctgctccacgtggtaccaattggggttactccagtcactgaagagtttggctgggacacctcagttgcggcacctcagtacttctctacctggactcttttttcatatattatctcattctccagagtctctccatgtggcctccctctctagaaggatattctgggcctgaaatgacatatgtttcagccctaacacaacacagtcttcattgcagtaagtacaaattattgtccccaaagcttgtctgagtaaatcgacatcaggaaattatgttgttgggattatttccttacagcatagtggatgggttccaaaaggctgagtagttgggttctaaactacttagttattctcttgggagcatcccaggataataagctccaatgtgtgggagtgcttatctaaccactgctttatcatactcgtgactatcttttggttgcagcaaatctatggctaaactcagagctaatgtgagagtatactggactggggtatgaattatggaagatgtggttcacttgaagcatcaatgtgcctgcctatcaaaatggcagataatttatgtggtcaaggtcaaggagcaagttgcagtatgtaacacataatgtaatgctacttaaattaattgatttttttttcattacttcagtatactgtgcactgttatgggtctgttattggattgcagaaaagttgaaactttctagaatttgatgagccctgggaatgttcacattggttttggcagccaccgtttctttctttcaggtaatgagattgtactagagtcaggcagctctcaacatttcaacattcaaatgtttgaccataagaccagaaaagatccaacatatttaataaaaagtgaaggcatggaaatactattttggatatgtttcactaataaaaagagcaagacttcagtattagccttctattggaatgtaaattattctgacttgaacccacactgaactgcctgcagcctgtaacttagaaggaaaaaacaaagtgccaccactgaactgctggccttctaacaaatatcacctattagcattcacaatgaaggcaagcatgaatcagcatgaaagtataccctatataaggtttcttttagcttctctcaagtcttgacacacacctgtgtcactgacagctagtatgcaaattgcctaaaagctccattaggctagtctaggcaaggaagcccatctgttcgttccgtgacactttccctcctagatcctcatgtgggaatatgtccttgagacatgcagatggatgaatttgcgccagtgtctggtaccaccaaccttaggggaagttgtcacttctacttgctttattgcctctaatatttgatgtcctcttccttcagatgccaaagaataaaattttaaatctaaaacttcaaagggtggtgaaggtttttaaattctgaatagaaagtacatattactttttaagcacaagaaaatggaacatgatgagccctctgtttaaaaattatggtattcactgggtgtttttcaaagctgtgtgtgtggtctggtgttgacaggagagaacatacaatttcaaattagctagtgcttgtcagctgttgctgatagctgttggaaggttttgggaaagacaggggcacggtgatattttggcaagcttgcctattaaggacatttgctggaaatgacttcatgattcctatccctttcttcttaaaaaaaaaaaaaaagcaacacaactacatgtaagcaattggaaaaggaaattcaaccacttttttctggtggttttttgagtagactcaagtctcttgcccatctcagattgaaatccccagagaaaagttagaagtggcaacaacataatcagaaaagcagctatcctttgatatctgatatccattcatcataaacaggcttctttcattttgttaatctggcctagcagaaagatctactcatatttcattctcaacgaaggtaaggtggcataaaagtaatggtaatctcacctcctgggtaaagaaaacattacaaatcagaaaatcgtttttagaagcatacaataacttgtaatctggaaccagaaagatagatatttcctcttttgacaaatcctcattctatagcaaacaatgtataaagacatctgacatgtttaagacaggacagaaatgatgcttttgatcattttggcactaaaatgattcatgattttatcagattagcgcctgttttccatttttcaggaaatggtccaaaagacatactgtttttattgacaggacttccaaactagttattatttgctaataatgttgtgttaaaaatctgagcagagtgtcttgccagagagagagagagtgaaacttttatgcccaacggtgtttggatgagcaagataattacacccttgtccatagcagatgctctgttcttcgctttggcagtttccctgttcagtgtgcaaataattttctctactaaagttggtagctatttgctacaaatatattgcttttccagcaaagaatggatcttttccatcaccactcacaaatagcaactgaattgactggagtttttattgtttcaaacacatacacaaaactgatgtgaagcagaaagaaactcatatgaatgccccatgtctgtcaaaggatgtgaataaaataagttatttaccaaaatagttgaaaaactacattgtaacaatgatttgaacttatttaaattaagacttttgaagaagtcaatgttgatagtcaaatatttttaaaattcaaatgtgcatttagttagtttataatagaaaagacacttatttacatatattgcaaacatcttatgagctctcttagcccctctatttctgtaacaggcaaaattcactttgtacatatatagtgagaccaaaaataaggagctcatattcctcacagttttgacagtcatgtatgactatgcttgaaatgggtgggtgtattctccctggccagtgatgaacgaatacatttccataagccactatgcttgctttttgggtagcccagatgctgtggttttgtctgtaagcagtatgcttgcaggtgttttggcagagaactgcagaaggagaagggtggagaaaatacatttattatagttcccttttttgttcttaccacagccccagaagcataaaggcaagtagaaccactcctcaagttgccatgttttcatagatacataaggcaacatatacttatctaataaaactaataatataattgggggttaggttgatgaattacccctgagtctcccaagaagaatcattgttgactagacttttatggtaaaattcaccttccagccaaagattaattaagtgccaactgaaagattttgttccaagtatgtatatgtaagtgctgagaatcagaagtgtggctggctgcgtggcctgtcctcaactcttcagcattccaggggtagaaatatctactgaaggacaaaatgtttatcaccagcagggacatgagaaaaaaatgtctcctagaaccttaagcagggaggagataaatctgtctatgataaaggtttctcagaggaggtgaaatttgaatcctgccttcaggatgaataggcttggctactggggaaccaggaggaaggcattttatatagaacagcagcaggaatcaggaggcagtagactgctcattttcaaatggctttttcagagcatgctcaaatactactattaggttagacggcactgaaaagagaagatggccctgtttggacattaatattatttctcttctcacataagaaaaagagaggcagcagaaagccaggcgcggtggctcacacctgtaatcccagcactttgggagcccaaggcaggcagatcactaggtcaggaattcgagaccagcctggccaacatggtgaaaccctgtctctattaaaaatacaaaaaattagctggatgtggtggtgtgcacctgtaatcccagttactcaggaggctgaggcaggagaatcgcttgaaaccagatgcagaggttgcagtgagctgagatcgtgccactgcactccggcctgggcaaagagagtgaaactccatctcattcatacatacatacatacatacatacatacatacatacatacatacatacatacacagagttgcagcagaaaagctaggagaaatgcagtataattttgttaggaataccagataatgatgtgtatgtatatactaataagaatttaataactcaaatatttggaaacataattctagttttatttaatagttacactggtgttacaagagaatatcaaacatggtaggataaacaatggtacagtaggattctaggtacatccagggttaagtaagattagaaataactttcattcacataagacataggaggtcatttttcccttggatcctcagtgctggatttccatttccgtttctaggtgaagagaactgaattgtgtaagggccattcacagaacttaatcactgcttaaaatgttgtatcaaagttataaataactgagtagatcctgtatgaaattgggaacttccttttccataagataataaatgcctgcatcagggacatggtccttattctctttttgttccttttacttaaacttctcccttactggctgctattctatcctcccttctctaattacacatagacacatctatgcttccaccctctttctcctttcagaatgtgcttaaacacacttagtaaaaacagtccattttgggatatcattttctccttgcgcgggagtcttttaaggttttaggatgaagcattattgacaggtaacttgtgtcctttctaatcactgttgaatcatccctgcagtttctgtgtttattcttatgcctgatcacattcgataacaaagcttgtgcaaaatcaaaaacaaaaaggtcttgaactgcaatcaaataaaggggagctacctggttaacaaattttacaaaacatttattggaaaatatatctatcccatgagataggacacagtcaaaggaccacccactttctccattaacatgtggatagctgtctgcttcttactgcactttcattctctaaaaataaccaccaaggtcttttagtgaaaataagtaagttggaaccaaaaacaaaggcacaacattcttctccaaataagttgctcagaaatgctttttcgtgaaacatagtttctagcatcttccattttcttgctatttatccatgcttggaattacttcattcattagttctgacaacggattgtatttgtatcattgcttgacaaatgtgttacatgtttcagtcttaaaatattccactctgagctcagtgctgcatacttgggagataatgttaaatcagcctcgcgacacactgctgtcatcatgccaaataactcagggaaaaatgataagggtataaagagatcaataaggcaagaaaatctgtgctttcaaaagtaaggcaaaatatgagaaagactatcagtcaagcatcggggcataaataaagcaagaatatgccacgtttagggcaccgtgatgctacagtgagcaattatcccatgagtagtaaatttctcttacgtttgcctaacacctttattgtaggtcattctaaaatgtagccatgagattcaccggcacattgatcagcctagcattgctcttttttctcccataatagaataaaatgaggatatggctgataaatgctgagaaggacaattcccagaccatttagatgtgagtggccacactggagtgttctccctgtgtaagaaagatttatataacgcacattttttaaaatatgaattatgcaaatacatttctgcccattgagatgatattactcaacagggccctcgtaagtgcccagttctgttggatgtttagacagaaaacaagcaaactgtagataccggcaatttggaaattaaatcttttattgagtaataggtactcaggcgtgcatcaggaagcaatcgtttttctttttcagcaaagagcattaaattattataaatttgcaacaataaatggaatagcttgcaggcacaagacagtaaatttatgaacatttgaaaatagaaatttatttttgtgtgctaatggtcagggagactgtgaaactggcccagagcccttgaatgtcagtctcaggaaggtgatctatagacagtgaagagaatttcaggattgcttttattaacatggggatgaagtgtgaaaattaatttttgttgggggaagataaagcttaaggctgcatgtgggatagattagagtacttggagcttgggaacaggaaatacaatttggagacagttaccttaatccatatgtgaagtgaagtgctctgaatagaaatagtagaacggatggaaaaggcagatgtgggagacactgagaatgcagcataggcaggacttggggcctggctaagactcagtcatgacaatgaaattttttttttaaatgatgtatccagatgttaaattatcagtatactgtatatctgtggaaaatgattgctgagttcaagtgaatattcaaggcataatgtaggatgaaattttcatgccatgatataacacttggaagtacccttcagcatgtagagccatcaggaaaagtgtccaaaaaaggacatgaaggggcatgggctaaaacacattgtagacagaaagaacaagtggaaacgcataggaaaagcatggcctctgactcattcctgtggactatttagaattaaacatctgttgctttcaactttcttggtgctctccctatttaccttaagtcatttagctctatcacacgagatacttacatctgaaaatggaagatcacctcttgatatgacagagagatagaattttcagaacacctcttggtgtgtgggagaggtggagagatggaggtgtggctggaaatgtgagatagtgcaggtttgcctagaagctgacaaaatttaggctttagggtccctccttttccccaacctcttctataatcttatatctaatcctgtataatcattttgtattcttctcaaaaatggtcaatggccatccaaagtgtataaaatttagatcccacaagatccacattctttccttaactggcaatgtgtttccatggttacatggatttggaaaatttgtaaaagaaatgcattttaatcacaactggtccttgtctcttttcacactagtttccctatttgcattttttttttccttgcagtggtggcaggtattttggaatttagctaagggtaagttgggtaagagatgcatttattttgaattcaataggatccatctttgtgttattgctagctgttttgtggtctgaatggtttccaagaatactcatactcctcactgtaccagtgtcttgggcattgtggcaggaacgtgctgggccaactcaaggttctattgtgataggaatgtggtctctggtgcccaacactggaaggatgtgggaagtagaagaaaaaatctgaagccagaagcgaactctgtgcaaaattcatccacattgttatgcccaaatttactatcctaaccttcctaccattcttaccttataacaagttataagctattaccatttatgagttgtgaagctgaagaaaacatttctgaactatcactagaaaaaaaagtgcctatcagctgttagaggacaggcagaattatctgtctctagataattctccctggagaaaatagtatgaaattactctcatataaagagacaatcaaaaggtttgcagcaaaaaaggagaggggattatttctgaagtgtgtcagggaattaatattattttctacattttttattttcatgttgttcttcagctttttaatattagtgatatgttgaaatttcgtttttattctaaacaaatattcattttttaagtaattttatatttataaattttattctttttttaatgggtctccaacattgtataaacttaaggcacaacaagacctgagtttgtccttgggttcaggggacaccttaattttcataatcaagtatgtaaacttaacctctggctcatccatgcagtccacgtagagttaaatatctgttgctttcaacttttatggtgttctccgtttttaccttcagttagctctccctaatattatcttaattctctaattattataatttgggaatatcctatgggtttatattaagtggaatatattggtatcccttagtatgctgtaccctaattccagttaaaaagaatgtccccctttctgcatagcatagtatttgagaaatatatttaaacagacttttaaaactgtttcaaaacagagatatgtggttcaaaacaaaacaacagtggaatatacaccaaagtcgggaatatctgaacatggaatattattccatttagagaagtttgagaatttaaactagtttcatttcagaaaagtattttcagaagtgacacaatccggtgaaataaagtatataatcagaagtgtataatctactgacaaggaaaggaattgtctatcgtttatcaatactctattatattttggtaaaacaaatgtaaacattatttttactccatctcataatggaacacataagatgtgttcttgactaacaggaagaccaaccattggaatttaagcttgtataataggcaaaattataatgtcagtgattatttttctagttttcccctttgggtcttcaataaaaaataatctatatcattaggcagggatgagatattgattggtcactaaaactagcacatcagctacaaacataactttcactttcttcccattcataaacaagtcattatttgacctgctgggatgtgataagaagttcaaagtaaatggaacacactaggtcatgccattctcagtcttctaatcaagataaaataagtgcagaatatacttcttttttgttattatctgtgtcattgcgcaaaattgtaaattgggtccaggatagaaactggtggccaaaattagaggtgtgtctatttgtctctctgaaattgctaacatatgacactaattgactttgtcagaatcctcagtgctaaatgaaattaatgaccagtggaatccaaataaataaaaggaaatgtgcctttgcgtatagcatagccagattcaggatgaatagacagtcaatgttgcagaatattataatactccaaaaagtggttcttggccaatggtgggtgtgctagaatctcactcttctgcatgactaaactgggaggatttcggcattaaaaaaagagctctgtctctgtgatgtagtgtatactttgagaatctttgctttcctctgctgaaataaggacataactctagagggtgcctattttcattgggtgaaaaatattcctttgctaaaaaaagtctttcatatgagtctactgatggatcttaattcatttgagtaaaagccaccatgctaatagcaaaagtcctatgttgttagtccttctctcattttatttttatctgtattattactaaagcagttttctcccattactgcaaaccacaaggaaaagcaatcaaattgattacatttattgtcttcgagaactccagttataaaactagaccattccatcattctattcattgtgatacttaaaactgtcactctgggtagtaaaatgtgttttcctttattataaagaatacagtttacagtaaaataactggacattctcacaagaattagcattggatgcaggtgccattttttcctgtactctatgcttgatcaaaaggccaagaagcaatctcctatactcttaatacaggtaagtatagaccatatttcagtattccaagtttatctatttatcttttctttgctttctatgctgtgctgtgtgctgagaactctgtattaaccccacctgtataaactgttctactttcattatcttaggacttcaaggagtaattgtcactggatatattttaatctttaaaatattttctcataacagcatttattgtaatattatcattgaatttatctgctgaattctaattatctgttctattttacacatgttatagtgtaggttaaatttttatcaattacctgagaattagaaatctctggtctttgttacattatcataaattttctctaattagatctcttcttcaagtcgaaattctggatggaaattcttaataccagtagtgttaggaagttgacctatagataaaaatattttctctacttacaaaactatcattatagtaatatagtacatagtaacatggtaatataatgagctgtaattctaggctgcttcactggtttgtaaacttagatcaattatccattattcgccaaagtgttgggttccatatgatgttggctatagggagaaggggagagcgatgcatatgtaagtttgtgtgtaaattaatatataaatcttgcttattaaaattttgaacttcacaagctattattaagacccatttcctgaatttaaggaatacttacaccactaccaacatgattttaagaaggcagtttgtatcattactattgtagttcatgctatgctttttgctttggcgatggatgctgtctcaatttagcttcttaccgttggtgtctctgttttcattctgcttaagatgtagtcaattttatggcattaatggtctgccctctgagagcttacagtagaccctgagcatttgtaaagcaagaaatgatgttagtaaagatactttaattgcggggagttctctgttggctggtgaataaggacgttctctttgagttccacctttctttgagaaattttcatgtttcctgtacttttcctctattatatcatggaaacttactaaatcagcctgtgcattccgcccacatattccctcatggtgccttccggtcctagcagctgagccagggccatcaataaatcttcttcttttcccccaagatattcctagttgcttctttactattcattcttgtaattccattcatctgtgtgtatcatttaggatgctgggcagttgcatcgcatttcacctaaggtcacatcctgatgggatttggtgggatcctagagctggctaggaccacttgtgagagctgattgttaaattctccgaaatgacgtgactcagttgttagactgcttaaaggtaaaaatcagtggtgtacttaggtttgtttttttttgttttgttttgttttgtttttatcaacatagctataaatcagggcttttcccttgttttttttttctcgcagagtttcagaatacttgcacaccactaattgtgaatagttttctgttttgattccccacttcttgcaatctgccttttagtgcatagagcaagcactgaggcttctttaagggaagcaaataaatgatcactcctagaacactctatgttatagtgattgtactttagaaaaggctattatcggccaggcacggtggctcacgcctgtaatcccagcactttgggaggccgaggcgggtggatcatgaggtcaggagattgagaccatcctggctaacacggtgaaaccccgtctctactaaaaatgaaaaaaaaaaaaaaaattaactgggcgtggtggcgggcgcctgtagtcccaactactcgagaggccgaggcaggagaatggcatgaacctggaaggcggagcttgcagtgagctaagatcgcgccactgcactccagcctgggcaacagagcgagagtctgtccctaaagaaaaaaaaaaagaaaacagaaaaggccgttatcactatttgccaagttttacatcgtattcttcaaccaaagcaaaaacaaaacaaaagcatcctctgaataatggagatgtgtagaaagtactctggaatgtataaatgtattactatcccattcttatgctgtggactatttgcttcagctaccctagagcatctatcttatgacttgttagaaattcgggagataattaaactgaaaaaaacaatttaagccattgtttacccacaaaatgttcttgcaggggaacaattttttaaaaatctaattatttttagtgttaggagccatgaaattagtatagtttatttcttgtatataaaactccttttaattaagtgcatggatatttagtagttggtgtgttatttaacgtataagttttttccactgacagttaaatatgtcttattttaattagtacttttacaacttttagatatttctcagaatctgtgtattctaagaatgacttcccttataaaaatttatatttgtcttaaaaaattcttctgagagtcttgtcatcagcttatctgagagcattctaactactatcagtagctactattagtagctcctctcagtagctagaataataccaactaaacctaatgtcccattaaagaaggacattctttgacttataatctagagaatttcattctgacaagcatcaatggactttttactttgtatcatgagattttaaatcacacaagccagagttggctagatcagtcaacaaaccaatatacctgttaaccaaaagaacgttactgttcatgaaaacaatccatattataaaaatgctttaggatttatgtgataataatagctagcatatatagaatgctgtgtgccaggttttattctcagtgctttacacacaatcactcacttgaaatggttaacagtgttctgaggtagctattatttcaattttttgagatgaggagatggagacaaaagaggtggcatagaggtaaagcaagatttgagcctgcgttgtgtgtctgcaggatctatgtccttagacactatacaatgacaataatgttcctttcttcttcctgagcctatgaagagtataccaatcaagggcaaatgccctttaactgccagtctctgaagctcaattacttctttaaaaaaggacaatagcaatttggagaagaaaaagcagaactgtcttattactagggatagttccttctcttatgtagaatatcaccagcccaaaaaaaaaaaaaaaatctccagtaataatcacacaaaaaagaaaagatgcatctggaattggatgtgcctatattctttcgagaaattctctaaggtttgaggtgcattgacttaaaatatactgaaaatgggagtcctcatagaggtttataattaagagcaatagaagtttgtgtaaatattttataagtttcttattataaaaattataataaatttgataatgtaaattgcctaatattcattttatcatgaggtatttttttcttaaacttgaacattaatttattctcatagttaccacctcacagccccaaacataataaattttgaaaatgtatttatagaaaattatctgtgcaagtgctcatttcaatctttacaatgaagcaattactttgcatgtattaattcctgtcacatttttgatctgtgctctaacattgtcttcttgaggaaattattatgttttatagttcaaatttcttagatttaggacttcaaaggcctaggttctgttcacatttaattttgctacatcaataaaatatgaatgaattggctaataaagcaacaaaactattttatgtcatggaatataggttatcgtttatgaaattgctgaattgccctggtaattcactgtaagaaaaccttctcctttttttgccttggtcctgtttggacagaaataaaattggtagcatgtgtgttacatggaggatggcagggttgcgggggtggtttctcttttgggatggcaggtaaagtagattaaatggtattgaaaatgctgagggccccaggcaggcagcttgtctgccaaagagagacacatttactctgtacctacagctaatcttaatttctatcttttcttggtatttagcaattttacaatttagatgaaagtttggttattggttaaaaagagaaaatacaccttttcccctcaaattatatttttacttcctacaaatcttttaataatgtgcatgtttggtcaggggaggtatcagttgaaagagaggttttatatgccaaaatataaacctacttcttgagtgtgggaggaagcttgaatatggtttctactaaaaggagattaattacattttaagaaattcctgtaactagtagcatagcatagaaactgtgaccattatttcatcagcacatagtatgggagattatatgttgtagctataagaatgatatatattagcattgtccagtagaactttctgtgatgatgagaatgttctgtgtctacctgtcagatacagcagtcagtacccacgtatgtttttcagcatttgaaatgtaactagcgcaactgaagaaatacatttttaaatttaagttaattttaattaattacctgtgaatttaaatagctgcatgctgctaatgactgtcagattggactgtacatatttatatttaaacctggagttaacggaggtgaagactgcttagcttcaggtcctgggtatgatgctgagcagctgaacaaccttgaaaagtcgtttaacctccctaagtctcagtattctcttcttcaacatagagataataatagttcttacctctaagagttctgagatcaggaaataaatcaatgagcataaagctcttagaattgtgcctggaatataatgtatgctcaataaactttagccattgctattcttattttataatcttttgtagatattgatgaagtagaaactgaaaaagtatggaaatgaaatagctctaaagtaataaaaggaaaatgtcctgaatgggtataattttaggtgatccttgaggaatatgtgggatttggataaatagaaagtaattacagggtgaccatacaccctgatttgcttcagacaatctcaattattccttgtgtcctggtttaattactaacatccccctcttttgctctcaaattttcccggtttgtaagataaatattaagtcactgtagaattagatataggagtacagcccaggcgtttcagatgcagggaagataacatattaaggtatagatgcagatgtgactatggtgtggtttgaatggtgagtactgggaagtagaaggaaacagggatacgtgtaggctggacacattatggagttgggatgagaactggtataaggaaattagattggattgtatatgctatttgcactattgttgaattgctcctgtgtcaacatagattcactttcagaaaagcaaagttcccatttaattggacaaaaatatttggtgtatcaaaaaaacctgatactattttgtgttctgattgtatttccattactgacagtaattttcgttatacgtaattgggaacaaagtgtgttatttctatcatccctttgctacaagtaaccaaatcagtaatatgattggttaatatggaaactagtcaattaaaatggaaaatgcctcattattatctgaagccatgactttcacaactggaggaaactttgcaagagttcatttagttgcaataaagtattatcactgaatattttatgttgctctttaagctacatccattgtagcttatcactgcatattttatgtagctctttaagctacatccattggtcttcattctacttaggagggtgtacattttaaaaaagctaggggaggccaagcgcggtgtctcatgcctgtaatcccagcactttgggaggccgaggtgggcggatcacaaggtcaggagatcgagaccatcctggctaacacagtgaaacactgtctccactaaaaaataccaaaaaaaaaaaaccccccaaaaaaaacaaaaaaaaaaaaacaggcgtggtgtcacccgcctgtagtcccagctagttgggaggctgagtcaggagaatcgcttgaacccaggaggcagaggttgcagtgagccgagattgtgccattgcactccagcctgggcgacagagtgagattccgtctcaaaaaaagctaggggaattttaattgttggcaatattactaattgtaattttagggaaatagagtattagactgtaggaaaaaccccgtctctactaaaaatacaaaaaaaaaaattagccgggtgtggtggactgcacctataatcccagctactccggaggctgagacaggggaattgcttgaaccaaggtggtggaggttgcagtgagccaagatcatgtcactgcactccagcctgggtgacagagcaagactctgtctcacaaaataaaaaaataaataaaaaatagagattatggggaaaaactgaactaaaatattaggcaaatatatctttcttattaagtgtaagaatgttactctaagcataattgttgtacatttctgaagacctctttatctctgattgcatttgacattgacatggttggctagcccagaaatctccataaagagtttctggtgacctgttctgggttttccctcattgcctacttattctagctcatcgtgaaagcaggcatttgggttgatctctgaggtattccttggacaaacacagcagatattccattatggtcactttcagtatttctggagaatgctctgattctaacaattattgttcatattgtagctaacactgtaatctccagctggggaacacatcatggctcattattccacaaggaaccaatcattatcaatattggagtcctagcattttgggttattttcaaggtatacacttgactttttaaactaattccataagcactgcaatgtctgaagtatatgttaattttgtttgtttgtatttaaagagataaaaaattagtcaaattaaaagaagaattgggcaaagaccagatgtcactgccatttgaaaaactgataatctttataaaactccattgatgtcatttatagcaccactttttgctagcttataaatttattaatcaaatttgtttataggtgcttgaactgaacaataactagtttatttgtgtttccaagtaccatgaattttaaaatgtcatttaatatctaagcctctgaatagaattcaatgactttaaattaaacctatttgtaaatagcacagagcaatgtgtgattatgcaatctgctgaggttttcaaaaactaacatttagagcaaaagtgaatctcattctaacagaattttaataaaaactcagtagtgatttgtaaatgctttgaaaccaattagccatcccatccacaatgattgtttcatcacagcttagttcttaatgaaaatggcaaaccacggttctaatgacataatttcatttcaagaatagtggctttcatgtttaaaaaataattggctctttagcacccccttcaaggtgaattactccaactagaactgagaaggcaacgctcatattgtgggtctgccttgtgatgatgataatgacaatggtaatgatgagaaaacaaagaattactgaatattggctctgtgccaggccctgtgctaaacatttgacacataatttatacattttagcttcacaacactccaatgaagtgaaataatcataattcctctttcactcatgacaagaggtttaagtgcctagttagtggtggagctggattcatagtgggtaatctggagctcttaagcaccatgttaccactgttgacagcagctattacctaggccagttgatagagaatattcaaatgattgcctttcatgaggagttttgtcttttattgcttatttccatatctagctttgggtaggaaaagagaagtaggacagattttcaccaaactgttacaaaagacataattgaaacaattgtttactatgcttgtattctagataatggagaggcaattgcctagcataaaattgcaaagccataatgtatgtggttcatgaaaccatggctgtaattgcatggcttgccttagatattaatttagctgcatttgttattacttgcacagagagtattcatattcaccctcatttaaggctattatagacacactagtgactaccacagttcttatcgtgtccactctctcacgttgtgttcacactagaggagaggtctgaagaataaaggttatgtggaaattacactatcaaggagatgaatccaacagcctgcagcagtgttatccagcgagcaatggattacatgtgtacgtgcaagctaaataatgtatgatttaagacaataaggtagtatgtattcatttttggatagtaaaagagatggcatgtcagtcccttgggagattttatccagggctttacccttgagtggataaaaagagtacaaattctattgcataggaggtgaataaaaacaaactggggagaccatcagcagaacagactgctgtgtgatggagtccagagctactccaaaaccaccagaccaactgcctcaggatcctgccagcaaccagatgccggcaatagaactgactgcagtttggcatcagggctctgtgatttccagccaaggggaattgcatgcaaaaaatatttaaaattctctttgtaaagaattatgttttcaatcagaaggagaagtatgtttcagacttagtctgctgcaaatgaaatgtggcatactgacatcttggttacagatggtggaactgcgtatgttggagggggtgaatgccatgcgaagttgaactttggtttggtggtaaggttttgtttacggtttttttaggccattgagttagtatcattctgtgaggggtactgtactggcctttcaagaagatggtctggatctacttaaaatagtgattctcaactggaagagatttcccaaccctacagggggacatttggcagtatctggagatatttttggttgtcacaactttgggagagggcagtgcaactagcatctagtagggagaggacaggaatgctataaactatgctaccatgcacaggacagctccctaaaacagagaattatcttgtccaaaatgtgagtggtgccaaagtatggaactaaggtttaaaattatctggctcatatatattcactacaaccccgcctgcagacaagtgttcatcaaatatagtttgatagtgtataaaaaaattgttaaataatttgctttactctattgatgtgtgagcaacatttattgaatgtcccaaatgctttctgttaaaaaaaaaaaaaaagaagaaaacacaactaacctttctccaaacctacatacccaaaccacagattttacaaatgtaggaggacccagttgattcacttttcaaacttgaaaaatgaggtatatgaacaaagcacactaaatgaatcagctgtttaggaagatctacaagccagttcattttcctgttattaaataacaaaccatgaatcttgacaaatgaacccacttgtttgacagtatttgaaaaactcataacatgcttggttctgatggtcacttcccctttgaaattacattttaagatggacttcatttaaattctgatagagaaaaagagccttttaaccttcattttgactgtctgctgtttatcatcatcattctttccctcctgctgatacttagatgctccagagcttttgccagagcatcatcctccagtgtttacttcaaggaagtgtttatgtttattggtgtccatataattaagagctaaagttctgcagtgttgtgggagactgcgtggcttctggagtcagagtccctggcctcaagttgggctccagctgtgtgaccttgagaaggtcatttaccctttttgtgcctcagtttcctcatttgtaaaatgagaagaatattatttgcctcattgtgctgttgtgaagatagcatataaaatgcttagcaagcacaaacggatgctacctataattattaggattactattttaggaatagcatgtttcacaatggatgccaattcatcttatttcatttcctaaagaggacattggcactgatcctctgagatagcatccctaatgtgtggctgaagggctttagaccctattccataatccctaacagaaccttccagcaaagctacaatgactaaacatctaagaaaaatctgcatactaaccaagcatatgcagctgcaagagaaatcctctatctctcttcttcaatcagagtgtcatccaaaatccccttctgaatgtgccatttccaccgcttctaagctgacactgcaaattcatagcaaccccttgccctgttatagcacagtgttacagtgttcagtaaccccagaccgtaagtactctctcctcctaaataggatttataaagtgtgactttgagcaatgtagcaaagtcaattttatctgcaggaaaatatttttctttactaacattttaaaatcccttcctcagtgctccaaaatgatttaaaagctaatcaatgataaaatcccaaatccctctaaagacaaagaattgagaaaggaagcagagccactttaatcagtaaaggggctgctgtgacccattaacccctagagattattgacacttcttttatttatttatttatttatttatttattttttaagattctgtagtttggtcatatgtctttggcagcaagaacatacaaaatcgcttttgcttttcacaaattaattcatttaggcctgtgcatttgtcaggcattccgggaactttctgccaacattttgttgattaaaggatgtgtatttggaatatgggtggagaggaaggaatttataattcttaaaaccaaagaatgatttataatgctgaccgctacctgaatcaatcagtgcatcatcaacagataaatgaaatactaaagataaggaagagttcctacactgggtgttaaaatctgtggattgattggttcaataacaccgagaaaatcgaccgctttcagcagaatttctagaatttacgaacaaggatatgacaaagaaaaccgcctttttgtattttgttcagaaagcttctgaaatacattctttcttcacaagtctggtgcttccactcctaattataaattacatatctcacttcagtgcacacaagttcctgatcctcatcccaacttcggttggcttttgactattttgttaatttttttccctgtgaatttgttgggccttttggaggacacgtttattgctttaggcatcatgcaatttactaaatggtgttctggttatggaaatgcttacaaagagccctaggggggaaaagaattaagtaaacacatattgatcatcctgtagctggtgctttcttatttgattagtcaaggactcagtctgaactggtccttctaatctgtgatacataaagctggagacatttttctggctccctggtggttttaaaggctaaacaaagtctcatttttgaaaaagcctgaatgcagaatggaattcaaagaatttggagagaggggaggtgaaagtggtagcaaacagctttaaaaaggccctgggaattttaagagagtaaggcatataagggaagtaaagagaaatctcatctgacccattatgagatacaccaggaagccacctcggcaagcatgtactgaacacctactgtgtgcaggacttgtaaaagaggtagagcttaagttttgtgaggattccaagaagctaaacagaatactttatgtcaggaaataagtcatagtttttgatgctagctaagaaacttgagctttctgtagatattaaatttcaaaaggcaatgaatatattctatttaatccaaataccaggaaaagaaggttttatcctgtataattcattttaaaattcattttaaaattctatgtgaaaaatgttgatactaaagcaatactaaagaatagttgagaaaaatgtttctttctttctttttccttttcttttttttttttgacagagtctcactctgtcgcctggctggagtacagtggcgcaatctcggctcactgcaacctctgactctcgggttcaagtgattcttctgcctcagcctcctgagtagctgggattataggcacataccaccatgcccagctaatttttgtatttttagtagagatggggtttcactatgttggccaggatggtcttgatctcccgaccttgtgatccgccctcctcagcctcccaaactgctgggactacaggcgtgagccaccgcgcccagccaaaaaacgtttatttcaaagaagaaatctggaggctctgggttttgctcctgtcatgtctattctttcacttgtgcatttctcaactgttggtcaatgtgtgtttgcgttgcacaattttctttctttgttatttttactttttattttttctgagactgggtcttgctctgttgcccaggctagagtgcagtggcgccatcatggctcactgcagcctcagcctctagggttcaagtgaacctcccacctcggcctcctggatagcagagaccacaggcacatggtaccacacccagctaatttttgtgtattttttatagagatggggttttgccatgttgtccagactggtctcgagctcctgggctcaagcagtccacccatctcagcctcccaaagtgctaggattacaggcgtgaaccatagtgcccagtctggacaattttcttattcccaacctaccctgccttcccaaaaataaggggcataaaaggtgaaacatgatagaaagcttgaagctcgctgcatatgagatggtacagtctctggctgagggaaacaatgggaattcagagaaaaggaggtttccaggaggctgtttgagattttggtggctgactgtattctgagatttagaattaagaagcagataaagctaacaccaagttttctagcatggagactggcagaacaacagcaacattgaaagatatggggtaattgtattgggtggctggtgtggggaattgggaatgagagaataggtgcaatgggttgcatgtgatatactgaatctaaagcacattgtcttatagacagtgggaaatagggactgaccaaatttaaaatcctggaaggtgtaaaacagattactattgcaagaaatgaagctgggtactgctaaaacttggccttctttctctaaatgctaagtgctgtctttattccattttttattatatatatagtaacctaaatatttctcaagcacctactgtatatcaggcactaggctacatacatgacatactcatgtatggtttgacacattccctgctctcaggaaacacagattactgttagaggcaggcattaaataagccaaaaataattaaataagacccaatacactgaaagctgtgaaggaaaataccagagtgttgtaggatgatacttaatttgaaatcagaaggatggattagagccagccgagtagagtggggctgagaatgggaagggtgaaaagttgggagtaccacagtgtctggtctaagaagtgattggagaaaaagtctgataaaaaatcatgtggagctttcaggactttgtaataagtttggtgggaagccactgcaggattctacatacaaagtttagctgtctgtgattaaggccacagtcagttctatttccaggacatctcattatttacccagacccactaggcctgtcaatttggtcagcagcagaagttttgggatgaaaagacatactattttcatgttgaatatgtttcttgaggtttttttttttagaatgaaactgtagagacacaaagtacatttttttccctcagattatattattccttacctttatgccatggcacaaaatgtattatagtttgacctcatctgaatacttacttgctaatgtgccaaaaatgtgctgtttgacaaagacatacctcccaaatctgataaaatagctaaagactcttcatcttcagatgagaacccagcccaaagtttccccactggaatcttgatgaatgtgcttattttgtttttgggtagcatttggggtcacaactgagaaaatctgggacagttatataggttgatattactacaagacagatacaaaccatgaatattcatattattgttatttttgctaatattgtacacttattaatttctaggaaccattttgtttgcattaactcaactttttgaaaaaatcttctaacttaagagagtaccgttattatctccttcgtattaatgagaatgctgcttctcagagaggttaaggcaccacttaaaggtcacatagccagtaagaggcacagcagggactcaaccctagacagtcagtgttagttgagaacttttgaagatatgcctgtataaaaaaagaagcataattagtaaatatatatctatgaattctggtatgtataattttaaaaaccctcacattgtttattgcaattttctgggagtcattttatcattttaattttgccatataataatgtaatgaattaaaacagcggttctcccagggggagattcctaccagcaccagggagcatttggcaatgtctgggaatattttttggtgatcacatctggggaatgggcattactagaatctgggagatagaggctaaggatgctactaaacatcctacagtgaacaaggacagtgcccacaacaaataattatcctgtccagatggtttatagtgcctaggttgggatcctggattagagtaatttaaagaggatcttgaaggtaaggaaagaatggtagctccatcttgcaaacaaggaacattcaatgtaaagaaacgattttgggaatatgagaaagagctaagatggtttcattcattcagtcattcatagaatcactatttataggaatgatttctttgtatcaggaattatgctgaacagtaatgttgaggaaaacaataggagggagtttctttggagaaaaggagggaacaaggtaatagagggaaaccaaagatgcttgggtattaaaggtaagctagggtcagagtttattgccaaaagtgactgttttattttattagggaagaagatatgctactttaccaatctaaggagagtcactatagtcagagacaagttcaaatgccatatgctactgccaggagcacctgataactgttttttgtcccttttatggctgacttatgctgatctgaatggagggccagggcgggggacgatattcttgaatgcaacagagagtagtgatataaatgtgtgtgtgtatgtacgtgtgtgtattggagaagacgcatagcttacattgatttcaagttgtgctgctggcctgtgaataggtgctggcttttgtttttccagtaacagctttttctgtttccagcagtcctatgcaccagctccccaccccatggctcctcccagccccagcacaaacagcagcagcaacaacagcagcaacaacagcagcggggaacagttgagtaaaaccaacctgtacattcgaggcctcccaccaggcaccactgaccaggacctaatcaagctgtgccaaccgtaagtgtccttctgctgcccgtgctgtttctcactcccatacttgccttggtgggcaggatgtgttatttcagtcaatgtactcatccactggtgtctcagtgaggaagactcttctttacaaacaggacttaaatttgagattcaatgctagtttattttggggagtggaattggtttactttttgttgttgagtggaagttcttgagcacatatacatggaaatgctggctgattcatagatatatgacctgcaagatgaagatcaagtaatagagttacactctcaaaccatgtggccagtggagtcattgatgagtctcatgaaataaacgattttcttgagaagtattagtgaaaggaatctcaaaaactcagaagcggtggatttcaggattacctcttgtgttacaaagcttttctggccagtgcttggtaaatgtccgttcagccaggaccatgtatttggagaagcataagactaatcctctagtttctttgaaaacatctgctgcctagtccagtgaagctatctcccaccaaggccaaggaccacactcactaagtagttttatatttgcttggaagcttggaaatgattaaatcctcttcaaaaatgttttcatgaatctactatctaccaacacttatgtcattaattctcttatttctgtgcaaataaaaacatatttaagttcaccttcccataaaattaataatgaattaagaatcatagacctggccgggcacagtggctcacgcctgtagatcccagcactttgggaggctgaggcaggcggatcacaaggtcaggagatcgagacctgactaacacggtctggctaacacggtgaaaccccatcctggctaacacggtgaaaccccatctctactgaaaatacaaaaaaattagacgggcatggtggcgggcgcctgtagtccgagctactcaggaggctgaggcaggagaatggcgtgaaccaggaggcggagtttgcagtgagccgagatcacgccactgcactccagcttgggcaacagagcgagactccgtctcaaaaaaaaaaaagaagacgaatcgtagacctgtattttttggttagtatctgattattttcaaaataatattagaacatatatttgtcatttgattgtgacttagctgtgtatttttaaattttaaaaaactattactcaattgttatttttctcttttgcaatgctttttaaaaagccatgaggatatttattttgtaaatgttctgacctctaaaatattgaaagaggaaaacaaagcagaaaatatttatttgcctttgtcctagattttaagattgggaatacatatcaacacaacagaaagtggcagataaaccaaaatacaaatacataactgtctaattgtttgacaaaacagtaggtacattagggttggagtcccctgttgctactgagtgccttgatttgtgaaaaaggcaaggcggaaccttgaaagataaatatatatatttttaaatttgttcaaaaaatgttaaatgtgccaaagctcagacatacaaatatacgttagattttggcccatagaatattgaggttgagaatcagaagataaataactcaactttttcttttgttgtttaaaaaatctaaactctattttgaaaagcaaggtctttgaaaatgtgaaacattgtagactttatgatagaaggttcaggtgaagtaaaaagaaaaatagctattgttcttaatttatatttgaaactcatttatttttaagggtagctattagggaaaggttctttcttactggtctttaccacttgtagagcctgttgacacacagatgtctgggcccaaggaattatgattcactaggtctggggtagagcccaagaatatgtatttcaaacaggatctttagtgttgttgatcttttgtgaagcacttctctcaacagtcttgaagaacaccaactatttctattgtataaagtttcactaattgatgagggtagttgagatggaattttgagtgttaaaacctgttcaaccactgtgtaatcttgaggcatatcacttcctccctctaagcctcagtttcctctttcttaaaagactgggttggtttttattatttctgtgtttacttgtagtatcagcagtgtgctggagctggctctgactaacacacttgagccaattgttacatattcaagaattttgttagcaatctgttacagacttggtagcatgaaattggcccttgtgggagtatttataacacaggaatcagcacatcctgcaaatcagagctttttaaaattttattttattgaaaagctgctgtatgaacacaccactgatgtagcatcatactatgaattgctgtgtcaatatccatttctgcatagaattgccagaattttgtaaatggaaattattacttaaaagcctatattgccatttttaactcagagatgtggtaacacagaaacattgttgagggaataagttttgttaatgttttttatgtgcatttgataaagaatattaagtgaacagaggataatagttacttgttcatattaatatttgtcagctaataagatctggcccatttattgttattgtaaaagtgtttgtgggttctcctgttacagcagtgatctagaactgggatttattgcttagattatttttcctagagaatcttaaagaactgatgtgattgggcaacataatgtagtggaaataactgtgcactaagagatctgtctttcaatcttggctatgctatcaactgagtctttggccttagagtaatgactttttgcctcttaacgttggtttcccccatatacaaaataatggatttgaactcaacaatcttttatgttttcttcattctaaaattttgatatttgattgaagacctcattatttatctgccagacttactcaagattaccttttgtatctttctccaatcccctcgtgcagtgttggcaggggcacagtcagaatttattcagcttcatgggtatgacctgatggctgaaaaaacctttggtaagagaccaatgcaggtcatttgtaaaaccttgcttgtttctctctctctctctctctctctctctctctctcgtagtgttggcctctcacagtgcttgttaccattttacattaacagtcttctaaagattaaaatcactttccattcctgtacctcatctcacactttaaaataatttcactcacacaacagataattttagtagatttaaatgaacttgccatcaagattcattttccatatttatttctatgaaattataagcacttttagagttaatattccttataggaaatgcaatatttgctaatatccattgtaataaaataatagaaaacagatacacaaaacagcatattgtctttttttaaaaaggcatagacatattggattttctggtattagtatattatatccatgttaatgctaatgaacggtaagaaaattgtattaaagaaaaagaaattgcattatttctaaatatataatctgagagcaaattcttattgaggaattctattcacattcatcatcaaaacttctatgttcagatcacaagtaaaatcaaagaaaagaagataagactgaagaacaataaatataaagaatgattttactctatggaaaaatctagttgtacctatgttttggatgaatacattatactgtgcgtagcgtagaaaatagtatagttaaaaaccttgtaatgtctttttcttgagacaccttaaggaactttattttgttctcaatcaagaaatatttacagattatatcctgcatgcctgtggtgaggagtcagtggtgagtaaatttagataaaggagaaatattatattctactagggaaaatgggcatcaattaaatatatgatctgataaaaaattgcaactgtaagtgcaaaagagagaggagcatgatactaacagattttttagcacaagattagacctagttagggcgattagcaaaggtatctctgaggaagtgacaattgagctaagattagaaggataaatagatttaactaatctagaaaaaagtggaagagcagccaggtaaaggaaacattgtgtgcagagccaagggctggagggggcatgccaaggacaaagggctaagaaaaagccacgtgactatagcagagagaaagaggtaaagtgtggggcaaaatgagctagaaaacacgaaaggacaagatgattcctttggagatgatgttagaagcttgatttatcttaagaacaatggaggaaatcattgaattgtcataaacaggaagttcgcatagctatatttttgtttcaaataggtaactccagctgcagagtacggagaagtgatcctctgagatcaaggaacaattagagtaggaatagttgaaaagctgaaagaagaatgctttttgttcagagaagagggtgtgagaagtaatattagtggtggtagaaaaattatgtgtggtgaaagattttgtcatatgcattcttttttccgttaaaaagcagggacatgggaacaattaaccaaatgaacttcaaaagaaacagcaaagtagcacagaatagaacccaaatgagttgatttttagttaatctctttttatttatttatttatttttattattattatactttaagttttagggtacatgtgcacaatgtgcaggttagttacacatgcatacatgtgccatgctggtgtgctgcacccattaactcgtcatttagcattaggtatatctcctaatgctatccctcccccctttttcttacccagtcttgaacgggtcatcaatatactgttaaacaattaaatggctgtaatattaaaagcactaaaggcaatgtaataaaaactaggaatccaactgattatacagatttactcatggatggatgatcagttgaagactactgacagaacacttggatcatatatatcctttatgcttatctcaggaagaccagacggaagtcggagaagatagatttggtttaagaaagagagagagagcattgtaacttttttgagccagataaaatatttgtagtgtaatgattttttacatataagttatattttgtccttccaagaaattggtaacttctattttatgattctgaatatgccctggaaacacatttaaattgttcctaaaaaataaaatcaaacgtgcatcataatgggtagcatttacaatggaaaaaaatcattattgtatttatattttccacatctacaacatattttatctaaccattttgtggcttataaatttgatttaatacaatgttctcaggaagccccagccaattgcccccactttcctgtgattgactgctatggagttaattaaaatattgtgaaggaacagagtgcattgtttttctattataaagtaaacatgccgctgctaaggccacttgaaacagaatgcaggaaaatagagggaaactcttgggtaggtacatacatatttccagtccttaccagaagagcaggaaagtcaactgccctgcccccacacttttctccgtaaatgttttctttgctcaagtcatgacaccctagcatttccccctttaaaatgaaactctgaatgtcactttaacatttaaaaagagaggggaaacacccacaatgaaaagccagaggaacgaaatagaagtgtttgcgctggagagccgaagggtctgcccaagctaatctcccggacttttacacaaccctgttggatgtctcattatagtgcgtgctgaacgctgaatagtaagagccagactcaagtgccatccaggctccgagcgcagagtccattatacatggtgtcagacagttttgacaaatgcaccgacacaatcaaaccttttatcagtttaaaagtaaccttgtcacaataatctgtcagactgttcagatacaactaaaggaaaacaagtcatcatgcactccagggtaaacaagtaaataagaaaaatgtgactggaaatttttagagttctttcttactgtgtcattgaagatttaaaagtttcctctaataagaccctaggaaatttattagtagctgtcttctgcaagtcagactcaaattacgcagctgcttttgagatgtcataaatctatgtggtggcaggtgtgagcaggaagtgaatactggaatctttaaaccctgcctttgtgtattttaaatgagagagtgctttaaagacccaaaacacgatgttggaattccttgattcagcagagatttgacaatgggttacgtatattcattcagatttgggcaaaattatgtttgccaagcatctgctgtaaactagacatagtatttgattagtactaaataattgtcattaataataggttgttatatttatatatttacattaacacagttattgtatattacatgcctcatactctactaagtttttaaattatttaatgttcaaaacttccctatgaagtgggaataatactttctttaaactgatactcaaaagggttaagaaacttgttcaaatttatgcagccaccatagccaccaggattcaaaatctggatctgacttcaaagccgatattcgtaatcactgaaacattcatataatgagaataagggtggcataaatcataggttctcagttccatgactactcgtgagaatcccttagggaccttcagaaaataggtttggacctcaagtgttctgatttaaccagtatgggtcaacctggattttgggattttttaaagcctgctcagataattctagtatgtagcaaagattgagaacttttagacttaatgatgctcacacaaatcggaaaacataatttaatcccctgttttagctctcttactctgactttcataggctctagcaatttcatgggacctaccactgtgctttcaattatccagaagtattaaaaatgaatattattgtgaaaatttggggatgaatttgattttctgataacaaactgacattttagattaggcacatggataataaagccctggaatatgcctctagaagtgttttcaaggatgtccttggaagaatcttactttcctgctttatataatttccaaaagtcaaacatttattcaacattctactttttaataatgtttgcatttaattgatgattaagcaagaaactcttcctattttgactcatatgattaaatttctatatatacttacatttttttgccgactatagtttagtgaacaaaagtccagtgagtcttaaaaaataatttacatctcctagtgttttgggggcatcctagaaattattgtcccactgattcattgatcactcatttattattgtttttattactttgaagaattttctgctgaatgtttacatatctcatgatcaatttaaaaatatacttaaattcctgatagccgatgatatttttccatatctatctttggaacagagaagagaaaaataaaaataaaaaaatcattgagaggaccaattgacttagtttacgatcttgatggtagcacaaaaaagatggagatgtaaaaagatgtgatcaactctttctggatgtgctgagtaaacatctggagctcagagaggtggaattctaggcagatctcatgctgaatgcctgaaaatttgagggacttgagttttaagggcgggactctggcaagttcagatggcatcctggttttctatttgtccagtgattttttaattgataaatacagctgaccctttttagtccttattttaattaagctctctgttacttgaccctgttgacccctcctttcttctcctatggatggtaaattccttttgcctggatttcctcttaccttttggagattattctttctactttctcttcttctacctgtctcttgaatattttggagttttctggagattggacccctcttttcactctataaactgtctgctctttattacacaaacaacatcagctattctaatgactaataattctatattgtccaccatcaactatttgtttagttctggatccatatctcattattccctagacaattccagttttgtaacccaagagctatcaaattcattgtccaaagagggttattcttggacttatcccttctttaagggatcccactattctctatgtgaatagtggtccaaataaaaaatcttggggtaactcttttccccagtctagaatcaatttccaagacctcaactgtttgatatttatgatacccaatagctcgtctgcttcagtactgccatggtctttttactcatttattcaaacgtacttattgattgtcatctgtgtaccaagcactgcagatatcttaaggattggtaagtttttccatataatttgcattctaatggataaaaatgatatatgaataaataattaaaaaacattagaatatgtaaatgtcatgaaaagcaggttgtaagtaatgactaggaggttactctagactatgtgttctctttaatgtgagacttcatttgcaggaaggagtcaggcagataatattcagaaataatgcattacagacatatgtaagaatttggccaaagcttgaagaaagaaatgagcttgttgtatacaaggaacgtaagaaaggttatgtattcttctgcaaagaatagattttagaggagtacaagagaagaagcaagaagacgagcaaggaggcttttgtggaagtacaggaaggaggtggtgatggcttggaataagatcacaatggtagaggaggttaagtgggatgaatttggaatatattttggagatagttttgatagcatttactcatgaatggcatatgacaaaagggttaagagaaagagaaattagggataacgccttaactcttagcttgagcatcttgagggatgactccttaactcttagctggagcgaatatggagccatttcagaaaatgaaaaggattgtggaaagtgcaactttgggtggacagaaatcaagagctcttcttagtcttgttatttttgagactgtattatacatctaaaatgagctttgcattgggagtttaatatctgattctagttttcaaagtgaaaaagtaaaggatataaaatgggagccataagcattataaatggcttttaaatccatattgatgagacaatagtgtggtatctaatatgtactacagactgttctaagtattttgcacgtgagtacttcatattacatatgttaactcatttagatgtcatgccaattcccattttataggtgaaaaaccaatgacatgaagaagttaagtgactttcccaaggtcacacagctggtaattagcaaatccaggctttaaattaataagttttgtttaagagccccatctcttaaccatgatccatacatagggagtgtgtataacaataaaagaaaatgttcacacaacttgaattctgaggttctaagagaatgagaaaccaagaaagaagtttataaaggaacaatcagtatggtaaaggacaaccaggagtgcaggagtgtgctataccacagcagctgaaagaagaaagtatttaaagaaaacagaatgatgaaatgtgttgaatacttgctgagaagtcaagaaatatagggagagagaagttacatttgggtttggcaacatcgaggtcattggaaaacttgagcaggaaagtctttgtagacaagtacaagctaaaagccatttgaagtggtcctttcttcatcactcaacaattctttcaagcggaaatatatgccttttttttttttttttttttttttgctccatctataccaaaatagtcatctttcctaacattcctcccttgatcttctggtttcctctatcatctccatctatctctgtctctgtcactatctcaatttctatcttgttccatttcagtaactcctctttctttcttttcctgtctgtttccttccctccctactccctaccaatctgtactgtatccttaaccgaaaacttttgaggacaatagatttattcaattcatttttttacccctagtacctagtacacttccagatttttaagtggtaactgataaatatttaatgacagaatgaagcccaaattcatcagtaatataaaaatgattttattggacttacatcataaaacttgttctaaggtagagtttgagtttatattgggagatacaggaaacagcattttatcttagatgctacatccaatgttgtgccactgaggtgaaagaaggaaggttctgaatatgaagctcttttattgtgtagatcccaaggagagttttgaagggaagcctcaggataacttgaatcaaaagaaacaaataaggatcaatactttgcttactcactcaatattgctgctgagacaaaaaaaaaaaactgtttatttttgcctgagccgtcaggtttcagctgtcaaacagatcacagtgttccaccaaatctgctaattctatgtctaatttaagtaagttggactcgttgaatggtgtttgctgaattttgttttttcacagatttctctttgcaatctttgacttttaggggcacacaataagaaactgttggtgaaaaaacacacagagcatatctgtgtatttggcataataaaaatgaaagctttttatctgaaaattggcagtagtatggtatatacacattgtttaatcatatgattgagaataaggtacagttaaaaattatccttaaaaagaaaattttaaaaaacaaatttttgttttatttcttatctgttgtcatattcgttatatctctaacacagtagtatctcttgagaaacaagcactttgttttacacggtaaatatgtccacagattttttgaaaatagattttttgttttagttttttaagccaacattattgaggagtaaaattaagtgcactcatcataagcataggatttgatgagttttgaaaatgcatgtacctatgtagccacgacaacaatcaagatataaaacatttctatcatccgcagagattttttaaaatataatcatattctaagaagtccacaatttaaaatcatcctacttaagaaaacaaagagacggcataataccatcacaagagtagcacagaattttgagtccattgtgggttctaattgaccacttactcattgtgaaatcttaattaagtcattgagactttctgggcttaatagttccaggtacatgttaagccctcaataattgttcattattgttactcacttatgcaatcaaaaacatttattgtaattcatatttttatatagcaggaatagttaaataaaattcacctgtaattttaagagtcttgtattcaaaaagcacatattttgatttttatattcctatcttatttgtatattaactgagattatacgtatttagtaaccatagatccttatattatcttgtagtattgtgtatcatcaccactatacatagtacactggtatattttacaatatgaatattcatggtatcagaataaatacatacaatttaggttgcagttaaaagactaaaattaaaatacagcataaaacaaatttaaaaacacagttatagtgcataaacatgtcataatagtatgctttgatagtaaaagggaagtttttgaaccaaaaggataccaagcatttcagttcttcaatataataaagcagtttaaaacatggtaatcatagtcaacatgtgtctatcagtgatattctgatatcacttggattttatccctgaatctatagattgaatttgactttagggtgaatcagttcttattaactaggtgtgttttttacatagcatatatttaaggagtgtttcttcaatgcttccattaagcagtcttttttttttttttttttttttttggagacagagtatcactcttgttgcccaggctggagttcgtggtgccatcttggctcactgcacctccgcctcccacgttcaagccattctcttgcctcagtctcctgagtagctgggattgcaggcatctgccaccacacctggctaatttttgtattttttgtaaagacggggtttcaccatgttggccaggctggtctcgaactcctgacctcaggtaatctgcccacctcagccccccaaagtgctgggattacagttgtgagccgctgcacccagccagcagtcttttaaagaaaattttgtttattaaaaatattcatttaagtaattacagtaaatttagaatcaggaagatagatgcttaaataatatcaattattgaaatattcaattataaatagataaattcagatgcatgttaaacttagtttaggttgacttgtttctcagaaaatatagagagcttgatatttctattctctgtcacatcattatgagggccattttggcaccagaatgcctgagttcagctctcaaacctatcaatttttagctgtgtctctttagacaagttatgcaacttctctgttccaaagtttctctttctacgaagtggatatagtaatgctacctccatttcttgaatagtaaagatagttaaatgagttaatacacaaaaagcacttaaatgaagcctggcatggagtgagtacccagtaagtattaggattatgagaacttacccaatataaactgaagttaatttgctcccaatttgaaaattgtgtgtaaaactgatggccattttgttcaaatgattttttacgctgtactgaaactctctattcaaatatacttctaatgtcctttcgagctcctgtgtctggtcattctttaattctagaccttgtgtatataaacagaatggcctttattatttgggccacagaccttcgtttttgatcattgcagccttccacacatgagttttcagagtcaccaagcctaacattattcgtttacctgcaaaactgagccttgctgattcttgcacaggaatctcgggaaatcaaccaaatttaagataaagaatggacttgtttcactgattcatgtttcaacatcatgggacaaacaagagacataatctatgggtgacctgcatgtctcaacacagaacagtggtgcaattgcacagtgaactctctgatcgctacaaccacctgcgtgttttattgcatattaggtgtcctaaggacactttcatgacaacaaaccagaaaaaggccataagcagttcaagtatgaacttgaaatgaggttatcagagtatgactgtaaaaggctctccccatttcagaatttaagagaggagtcatcctgaactgataatgaatgacacctctgaggaagggaaaggaggcgtatttccagggaatgctttttatgtcacagtcattttgtttgagcagaaagggatttgctgtcggtctttaaataaacagttctttgttctctgcctctgtgtgcgactcttctttctctaactctaaagcaaaaggctaggatttattaggatacaactttacgctaaatctgtggaagaataatgcatttgtattcactccatgtttgaattgcagcgaaaaggacaattatagtcagagttgacattttagtgagtgctttgtacctggtattgttagaagcacttacaggtagagtggtctactctttctggtttgctcaggacagtctcagttttaccatgtaagtcctacatcctgggaaactcttaagtagcaggcaaactaggcctcccgttacaagtattatttcatttaattatcaacccctccaattcccaatgaggtaaccttatattcttttgcaactaacagaactgaggcactaagaggttaaacaatttctgaagttttaatacttactgacatttactgcaagtgactgaatgagaactcaaacccagacattacagcttactctgtttctccctacctgggagtaactattgtaataaacacttaagttgttgaactagaccttactcactagaactctggacttgggtacttcagtcttggtggatgtaaggagagaagaaaaattatttccacatcatttgtggatgacaccaaaccataatgctaacttgtctcaaaaatgcttgtcagtggctacaaaggattgtctttccgaaccactaattaatctgtaaccaattaagtacagaattctaacaatacaacatacctataatttgcaggttgtgtagtaccttgcgtagcagctacttaagaaatagtgttatgtctagtttggggaaaaaaactcttcagcaaaaatgtgttttgtttgtgttatatcctttcttactttcaaaaaaagagcaagaaaatctactcagacaagtcacgataaaatatctgcaaatataaaaccacatttcaaatggaacttactatttattatttaccaatgtgatataaatgcccattgatgcagtttaaatctttctatcacttactgcctatgtaaacaaccaaatgttcttactatagtagtataataattctcagactttgggatttagaaaaccaataaaataacaaaataagaagaggaggtcagcatagtgttaccactttttaattctattaagcaatgttaattaaacaaaacacttactattatttactggccctcagattgactttaaatttaccatcactggcacacttctcttaaaagttcgttttaacgctaaaagagccatcattttagtgtcatggttgaaagttaaatcgtatcccaacatacttcaaaaataggagttatgttacaaaaaataatttggcccacacagttgtattacatgcacttgtttttttggtatttatatgttagtttgtgacactaaattcagtgcaacattacatgggggtcagttttccaacttgctccagagcttcctatttttaccacagtagatgtagaattccatttcacatctgcatgttgacagaaatggagcagcatatttcatgttatttcaattgagagttttctgggaaaactgagagaagcagaggaaccacagcccccaagctagtgccaagaaggaaacaaactacagcgggcctaatgtctgtctaacatggccaaggggagaatggattcttggcttaggagtggttatgcccactacatccagagtgtacaactgccagcatggagggaatgaatttgaaagacatccattgggtcagggaaaatgtgagcaaggattgaccactggtatagtggctgggaatgagtagagctgaaaagtcccttcccaggtcagccaccaaagggctccatggtctggcaagtccttttacctgcctaagtttcagttgccccaatgtttttatggccttccaaactcctttcattactcaacacaaaactgtttgatttccaattctcttaagatccctcctttatgctaatgaacagtgcacactaaagtattaatcagttttattgaattagtagatttgtcttttcaagcacaccattaagttttacctggattttagtcacagtggtttcacctaaattcaaaatcctatgttgcctctttgcacagtcctgcttggcattgatgctaattgctaaaacattgaaattaccgcaaggatattattcatcttttgtttttgaatgccttattcataggggtaacttttaaacctgatgaaaggtatgtatcctaagcctaaaccagggtggtaaatggaaaacaaacaaacaaaaaatagcagattatgaaggaataagggaagcatatacttaatgtgtcaaaaatagtgaggcagatttgaaatctgtggttagtttttcaaagcaagtactatgcccagtacccaccagcacgtaacagtctacctcaacacacagatacacacacacacacacacacacacacacaccccccacacacacacatggtgtctatatgcttgtcaacactttcatatttgggagctgtaatttcctcaaaggtaggcacggtattgtcttcatcgactcccccacatttagttcaatgcttaccacataccaagtgcccactaacactttgtgtcaacaaatgttaactgttggaattaatttccagatcctgcgaatgtttctgacatcttatactcttatcaatttcactcctaggacagagggaaagaaatgcattccacagaaccaacactttacagaaaactcaatttgtgttagtacatgtttgtatattaaaattataggatgaaacttttttataacctcaaaatgctgaaccaaatagttgaaagggtgtaggtgatggtgaagatgaagaagccaaagattattatgggacattgtcttaggtacttgcaagaattagtgctaactcccccctttctaggctttttaaaataaagatagtaaaggtaaaatttggggacatcaggaaatggtccacagaaaaaagaccactcaaccagcatcttagtgtctccctaatatataattaagcaaaattcaatattacctacaatatcctcagctttcccttctacttatgaggattttgtggtttttgtttttttcagatatttaagtagatcaggatcctttactttttgagagggcaggcatggcaggttttgcacaaaaccactggggaaggaaggatgctgtcactttttttcatcttggatcagaactgattggcagtgtgcttattcatttatgcctacagtgcttcatttgagatgggctaatggacaggtacctggatattctttgctagccagcttagatagtaaatatgcaactgtttttcaagaaagtttccaagcataccacgttcatgttgttgcagcatatcctgtgtgaatcgtgtgaacaaatcatggtgtaacccaccttaaattcaataacacaatttgctaatcccctttgtttcccctgaaaagaggaggaaaaatcaaagttgcatagtgagtgttatgagggatattttgcatgaacaaacacaaattaggccatggactttcagagcagttgttttctggatctagatgtgtccattatgcttgaaggatgtcaagttatacatttaggcatgacgtcagataacagggattttcctgtgtaagaagctcgtagtctctggctgtgatatgtacaatatatggctccctctcaataggaaatgtccctcccagttgattctcagcttatttaactctctgttgtacctcctattttcaacaatcctcagggtgtgtggacgagttttaaacagagcatagatatacagtcttgccatctggatcaatggaagcaaaaatgagaaaacccatggcttattacctgcctcctttttttggaggctttgacctggttctatttaagagcattctcatatattttactctgtgatctagaatcaacaaatttctgcaaaatctataccaaaagcaaggtttcttgaaataattgggaaaaaaagagagatttaggatttcaaatgtcaataattacattattctgacacctagaatgcccgtaagccaacttcaagtgttgtttggtatattttgcgaaaagaattgaaaccagtccaggaaagctggagataagaaagagtttcagctgttgagccacaggaatcagttattattaatgtcccatcaaattatttgacatttatttgcttgattttatgtaggggacctaggttatagtttatgaaaacaggtaaaaacttgcaataaaatggaaagaaacatacattgtcactatccttcctgagtagctcaaaccaggaattttataataaacagaataagttaaggtaaagctgggtcctcaacaagggttctaagaggtcactaaaattgcatgcaaaattttgaaagtatgcttgaatatacatttttcagggtcaagtttacatagcctgaaaatgttttaaaaattggtgtaaattttaatgcattctggacgtatagaacctaatacttgtaatcttgctattaatatgttgatacattggagaaaatctacatattcacagagtttacactgaaagctctttgaatccccgctgcttcccttgcttgctaagacagaagcctcagggacaagggcagctgcttccaggatgtgaaatttagctaatctcaaatgtttgactttgaactcatttggaagatatgttttagtatgtagcatttgcttttcagccattttctctggaatgcttttactccacttaggtaaagaaaactgggacttagggcttccacaggaagtagataccactggattggattttagacaaggaagtgttctgtgtctctggtttggcacagcctggtgaaaattgttgaactgcagcatttcagacctggtgccagcctaatggctacatgccaagattactatttggcgacaagcagccagacaagcagctggttattgcagcgaatccgagcagtgtgcctgaggccatgtctctgttgccagatcccccaacccagttagtaaccaaacccttgaggctttctctgggtttgttctcttccagcctcatggtgggctttggcctggcaagggtcgtctccagcaggttgtcctgcatgcgtcctgagctgtggtgtctggctggaattaggatgcttatagaccacgtaaagttaagagatttcttggcagctgtggctgacactgtgggggcactggccagagcatgcttgcactagaggctggctggaagagggcagaatcaatatgagctgctggcattccacgctagccaggggtgatgaagtgacagcctgctggcatctccctttggccctgctggcatctattttgcactgttctttgtgaaaagtgctaagactgagggacctggtgagcaaacttgtcagaggaaatgaactggaggaggtgagggaagagaaactggcccacaagatagagccacaaccagtgactgtaatgatagtagcaataggtgatcacagtcttaagtaaattttctctgtatttccaaagtggaaaaaaaatttcttccctaggcatttcaactccctttttctgccagaacttctggaccttgagaatagtttgatgttaagcttttggaagggagaaagtatagctttccaggaggccccagctccctgtaggtattcccctcctgggatctggcaccatctgtaagtttgctgcagctgctgatgaatttaaactgagttagcaggagttgggcacagcatatttagaaagcactcatccctcttcttttgttggggtgggagtgaggagaagggactctggcaagattagtttccctctgttcactcacagacaccgtaatactgtttgcagcactgtgtcctccatgttgattcctgggtaattctcaacatctttgaaaggatctggtaatttctcccagggaaagttgaagtatactacaatggtggatctattaaaaatattggcatggaagaacaagagctctattgtctctaatccgcgtcaccacccaggacaagcaccaacaggacgctttctatgaatcgtgtcttttattccacatatgtaatcactttctggaactaagtttatgactagaatatccagcacttaacataaatgaagtaagtagaatgagagtatagtttcaatggtattctgccatggtaaaaattttctgttgccttttctttgattcgatacagtgataactcttttacttatttgaacatttatccaagaaaccttaatgttgtagcccaacatataaaacaaccctcagggctatctaggtcacagacaaagcagagtcacatacatagtttcaggaaaaattctattagtagtttaatgaatacttcatttccaaataattttataatattagatctgagtgttttttaaaatgtagctatgcatttcaacgtcaaaatagcacattggtatttggcatttttgttcatgaagtcatagttgaataatttgtgtttgagcctctatttactccatctccctccctatctatctgttgaacactcactcatacctaagaaactcacatgcatttcataatgcactctacattttgtctccaatttttgcaggatcgttcgccacaacatacatgtatgttcccgtttcactttgcctatatctcgatcatcacagttttcaccctgtgttctagttctttaatacattttcatctcttctgttagcctgaggattctgaaagcaggaattgtcttatcctttattgtatacattatgattttagggaaattaaattgtatagtaaataaaaattaacaccatttacagcaagtacatttaaagtttgaaatacagaggtagagtcgattcttgttattcacagaatgtttttctatgaagtcaccgcaaacactggattatcaaatattgaaccagagctcctgtggaaagtgtagggtaagattcccacaagcctctgatcacaactttctcatcaaccagttaatgtgtaactgttttgcatgtttctgtttaaagacacctacttaatagatattgttaattcattgacatttgtcaatcaaatcaaaattaagtttataatttacaaactcaaggccaaagcactgtaactgatacctgaacaaagcttatctaatacacatactttctcaggaaggtgcatcctagcttcctggcacttaggaacacactagagagcactttaccactacacgtggggaccattttaaacagcaaaatcacacacacgcacaaaaaaaaaaaaatcacaaaaatgtgaaaaacatggcagtaaatagatcccaaaaaggatacttgtttacgataagagagctgaaacaagaaggcagaccatcaccttgttctatctcagataagaatgtgcatatcaggctgtcaaatttttcaccacactgtacatgtcgtcaagtgacctcaaaactgctgtgagtactgatttggggattacaaataaatgttagcaagtaggcaaatttgcaaatacagaatcagtgaataatgaggatcaactctattatgtatcgctaatatttaatatgatagtcaccattttatttaatccaaattaagtgtgtcatggaaataggcttagtttctgtggagtattttataaatagtaattaaaaaattttatttgaagtagagtttactttaaaattatgtgatatccaaagtatcctttatttatcttgagtgtttaattcagaagagtgagaaaattttaaaacatgtgttttccactctccctgtaatttgctctaatacagaagttaataccatattatactaaaaataaagtatagaatgcataaaggcacatcacgagcacaaatatctgcacaatggattcacagcagcagcgatgagcttggctcagaatagaatatggatacgcatcttagtgatgataattcactccggagaacaatcctctgcaatttatccaatccactgtgtgccactggatatattatgtacaactttttattcatactatgtgggattatgaacaatatcaggattcattaagatgcctaggaaagtaaagaccattttcacagtaatagtattttttataataggaaaaaatggatattgtatttctaagatattattcaaaaatatttgcctacatgagtacttgtgggaactaaaaaaattaaactctcatctttaagtaagtgtgttcaatgtaaaaatcaagtgtttgcatgtgagggtgatataagaaatacatggtagggcataagtcctgacaatacacaggtgaagaaaggcatagcataggaattttaaaagtatataactaacttttacacaaggaggctggacataaagtactgtgataaagattgaatcagaatgagaagatatggataggatcttttgaaatggttcttgtaggacaggttgtattatgatggttatggtgagccacaggaaaaaagcacacccatgggacagcacagccatgctcagagtcacacttcatcccaggtagaatagtgtatgtgagcctgtggcatgagttgacacagtcaggtttgactcactcaaatcagtaatctggcagacatcttctacacctcccttcttctccacctccatagtcaaccagttgccacgtcctaacatgtctatcttctagatgtctctcgagtttgttcatccctttctcctcatccttcctttgactacctccacctaggtctctgcagtctcttactccaaaagcctcttgactattctccttgtctctaataaaggcccatcaatctgttcttcacactgcagttagaaccaacttctcatgttgtcaaccatataattttaccggtaagcccagaaccctttaaagattctcacatggcctgaagcagtggctcacacctgtaatcccagcactttgggaggccgaggcaggtggatggcttgatgtcaggagttcgagactagcctggtcaacatagtgaaaccttgtctctactaaatatacaaaaatcagctgggcgtagtggtgcatgcttgtagtccctgctactcaggaagctgaggcatgagaatcatttgaacccaggaggcgaaggttgcagtgagctgagatcttgcccctgcactccaccctgggtgacagagtgagatcagtaacaacaaaaaagattcttacagttcttgcatgttataaagacaattaaatacaggttgcttccccatttccttctccaaccttagctcttaccatttctcaatttgcactttttttttttttttttgacattaagccctcacctcaaataactatgattgccaggttgtcttttgcctacaggcttttataactgctgtttcctttgcttagagctttttatcttccccaccactctcctatctaagtaacttccacttacctgttcagatattaatctacatgccaattcctttaagaagctcttcctgactcagaaatttgatcagatagccttctgaatctttcacatagcaccttgtccttagtccctatagaattaattcacagttcattatgattatatatttaaattattgactcccttccaaccagactgtaagtttcttgcagatgaagagtatgtcttatttattactgagtactttccagtataaattgaaataacacagtgactggcaaatgggctagtgaagatttctgatggaaagagagtgctacacatagatatatagccagagatgcacagtatttatctgtatattatatgttaatactcagatggttcgtaatgactcatggtttattctttaaattagatagtaattataatcatctctgggtatccagagggaattggttctaagatcacccccttggataacaaaattttaagatactccagtcccttatataaaattgcacagtattggcatataacctaaacacatcctcctgtatgctttaaataatctctagattacttgtaatacctaataagatgtaaatgctattcaacagttgttatgctgggtttttaaaacttcaagttattgttgtattgttattttttattgttttgggtttattccaaatattttcaatctatggttgattaaatacagggatgggatacagagggccaactgtacagaaaaaagacctattataaatcttgataggactaatggaagagcatttaaattgtttttctcaacatatacattgaatttgcaagttacttatgcctttgttgagtggtcagatgtaagcaggatgaatattaccaccacactgtcagctaagcatattatcttacactacttcttacaaacatttagtgttatatcttcttttattcaatttatctaatatttttctctacaattaatgcattttcctattacatcatgatgtgagagaaactggatagagaaatcaaatgaaacagcaatcaggagatcttgttcttactctcttaccttgggaaggttaatctgactgtctgctgaagaagctgctgggatgagtgtatcagaacttgcaagtcatttgttcctctggacaactgtgttattaccaccctattatgtgcaaggcactttccaagattcattgataaacatacatcatattttcttaattatcattaagaagtgattgataagttttcttcgtttgaaatttcactccctcccctgtggttttacagtttaatagcatacgatttcatgataaactattagaggtaagggttctcttcatcagtagtctcatcatgtagagcttgactagcatttaagaacttgatttctgttctctttttgtccctttgtcagctgaataatttcataagcatataacaatcatctaaaatataaagaatggcattatttattatccacctgtttaacattccataaggacaaattatactcttcttaaactgtcttctgcttcctaggtatgggtatttatcatcatgagaaatattcattcattcagtctttcactcatttagaaaacttgctaatcatcagctcgtttaagcctctgtcataggtgctgaaacaaaaagtgattagagtaaaggcccagcccatgaggaccctagaggtgagtgggggaaccaagggaaggacataatcacaagagtgtgctaactgcaaaatgcatgatttcgaacttaaaacaattttgccttagatgcacttctgtaatataggccctttgggtaagtacagtagagaatttagagccgcaatttgctaacatgaagcaagaacttagaactgagggaaccatagaatcctagagttagagtgtgcattgaaacatccagttcaaacaatttgctaaagcttgagtttactcaagtgccaaatggtccactagcttggcttgaatacttctaataagacacactccccacctcctttcatgtgggtcttgatcaactcttgttgtttatgaattattttcttgtaatgaatcaaaatacatcttgccacacagaacaaagttaattcttcttcagcataacagccttgcaaatataacaaggtaattgttagtgactttgagccctttctccaggctaaataaaatcgatacaccattggtagaaatatgttcaccatcccaaagtcttttctgaatatacacaatagtacagagtttttcaaagtgccagttgcaatcagtgggtagtgatttcagtgcagtggatgagatttagaactgaataaaataaaatacaaaatgtttgtgtgttttccacatagtaagcatagatattgtttcatgaaatattaatttgtttcagatatgtgttcatggtggtgtttctgtgtaaactgactcccaaagtaaaatgtattttttaatgtgggtcacaagagataatataaagtaaaataaaatgccactgatgtatctggggtgaggtctatgaattgcatttttaataagcccccaagttctgatgatgatgatctatagagtccactctgagcactgttgcactaagtgacaacatgaagagcttacataagagctgagctgagtaaggacaaaggtgtcaacctacataacaaattttattaatgcttagtaagtgtattagtaatgcttaatttcttttgtatttttaagtgaaactaaatacttgtagaaattgtaataatgtgcttcgcagccctctttggagacaatggagatgtgggaacagtgctagagagggaggctgggttagagatacaaacactaggactctcagagaacagtgtctgattctcaggagttattaatttaggtttgctgacctcagagagagtatgacccatcttagttttctaatatatcttccctaaactgcccttaattcatctggcggacaatgtatactgaatggtttgctttgttttatgatctcaccattggtttcatctaactgctccagtccaaagttgattttccttaacagaaaatgtcaatgcaaaatagttcacaaattttactcactatttgtcattttccaacttgattttctcatttccttgttaatgatttaccataacatttcattttctcctcttcttcctttcttgtgcgcttcattttatcttagaatcatccaagggctgcttttgggaacaccttcagtgtgcaatatgcttacagttttgagggatttccccagcttctaaagttggctttcctttcaaagatgtatgcttggccttatgcctatgcttctttcctcactgttttctcttctccattcctgaaattcagaaccttgctcacccttacctttgcaagtcttcacaactctctatgccatagttcctctctccaggactcttctgttgttcagacaacaaaaacaaagtgccaattttggtttcacacaattccaaaaactgtttacaaactgttaacaattgcagaaagaagctttgatacacacaaattgaaatggcctgcatcttggtaatattacaacaccgtataggactgagctcttgaaatgtgtccaagagtaggaagtggtttttcgtttgtgagatatttgtgaacttttaatattttggagtatagcaagaggaagtctaaacttatgagtttatacctgccacttatgagcttgtaaattttgggtaagatacttaattttctgagtctctacttctttctctctctctttttttttgaaacggagtctcactctgtcacctaggctggactgcagtggtgcgatctcggctcactgcaagctcctcctcccaggttcatgccattctcctgcctcagcctcccaagtagctgggactacaggcacccgccaccatgcccggctaatttttttttttttttttttttttttttttgtatttttagtacagatgaggtttcaccgtgttagccaggatggtctcgatctcctgacctcatgatccgcccgtctcagcttcccaaagtgctggattacaggcgtgagccaccgcgcccggctctacttctttctctttaaaatggggtgataatacatgatgagattgagtggtttaaatacatgataaaatgtgaagaattatactcatggaaggttctgtgctaattaccaatgttcgattcctgaattacaggttcatttgttaagttaaatctaatttctctacagaccctttgtcaatgtcgttatcatcaacttcaggctgcatgcccccttttaggagaggctgtcttcagtctgtgctatgtattgatttaatcttgctgtgaattccaaatatttaatgataaatcactggctgctttcttgcatgtacattatcatatgttgcctcctaattcaatgatgtatcatattctcatttacttctgttgtccatgtatttattaagtattctgagcagtctaggctaaattgttggcagttgcctggctgtggacttggagctgatccttctcagttttcttgactgtttcttaaatatcagttctgggataatgctacccactctctctgtgtttcccagtgttactcagaccttagaatggatataatacttactttacccctgtttctcttttttaatttaacaataacaataaagctatatttgatgtatgacaaatgtatattcatagattgctaccacagctgagttgttgagaatgataactctataacccagagggatggagtttgtaaattagagctctttaattattggttttgacttaagagacaaatgacacaatgacttaagaaaatgaagtggcaattataaattaaacctatctttcagatagcttcagttttttagagatgatcttcagtcattcaacaagttggtattaaatgtatatgactagtgttttgttaagtgttaaaaacatagagggaaactatagatataatgctattgttaggaatttttaaatctcatgaagggaaaggcacatgaactactaaaatctgtggaagaaaagtacacagtatattttaaagagatctgatttaagctggagaggagggggacctcatggtcaggcttccatgacaaggtgatatttagacaatatgtgtctccagagcttctattcagcacaatcacatatttgttaacatttaacctatttttaggtaaatttgagggcattgttggtgctcagatgaacaaccaatgagtacttgtacctatatcaatgtagctttagattagcaaataaaaaaattgcaattttgcatttcacagccctaccctaatgggaaataccattcaaacatttggtttaactatgtatgaatctagcttttgagaaggttgaggtaaatatgttgaaatccagagctacatgtgtggtttttgaatcattcttcagagacaaggtatgttccttcccaggcatagaatctcgccattgctccctttccagccaatcccagttctgtcagcaacgattactcatggtccttcggttacaaaaaatacagggccacttgtcaagatatcagaatactaggattatgtatttctggttagttgaaaaaaaaaaaaaaaaagcagtatggaagcagaaatgccttaaagagagagggctctatagcactactctgggtcctggcagctggaacccttagcattagtccaaggtaacatcagtggagtggacatcctcattacttaaaaatacactacagtcgacactccctgtttcttccttctttaccccctaacctaaccccacactacatactacattaaactatcttgtggaaataggtaaacacaataagaaaatagagtgttatcctgttgccttttctattcctggataactagatgctgccctgccttccattgtacatatgaagatacaattcagaattgacagccacctaagcctgtcaaatacattgtttagtgaaacgtggaccaatgaaaaattttctacacaatgcataattgaggtctttgagaccttcaagatctttagtgatcttgttttttctcgggcacctgcaacccttaacttgtgtacaaattgaccacaatttaatgaaaaatcagcctgaccactacccagggctctaggggtttctaaaatataaagaaatataagaagattagaaaaaccatgcgtaagtctgtggttgcagccagtaagactgggaggtaggaggcaaggcccttcatggtcttgagaaatgataggtggttggtttgtaaaccaccttctaaggaagctgaatagccgactgcagggtgtttagtttggttcaagattgtcaaaagagccatttgcttaatacagcagaggatagactgaggctcactctccttcttttttccctagtacctcaagcctttcctttaaaatatcaaatttgagtttgaagggaaccagattattagttgactagggctttcaaatgcattgttaaaccatagttactcacaagtaaactagaaataatctaaagccaggactttgtcttgaaatcttttttaaaaaatttctgtggcatttggtataccttataggtatcaaagaaatatttggcagaggattgaactctctatgactgtcaggggatacaggtgattgatgaacatcacaggttgaatgttattcatcattcaggaaaaaaatacactgagatcaagcgctactttctctgggaggcctttcagacttgtcctcctctgttcacccccaccttattcctagcttccagcatagatgtatccatgactgcctttgttccctcgtgatgtcttatctcatgtatttcaatcatggccactctgtatcaataacagaatattggactgatttattttcatgtctgtgaacctgaattcacctataagcattttagggacagaactcacatctgattcatctcagtattacaaggacaatgattggaacagagaaggtaccagatatgtagtttaaaatacgtaaatgaagagtaaataataaacatgataacaataaagacattaatttatctagtgcaatctcatttctctgaaggaatgtacagtatccacaatgaacgatgatgataacacaagggcctttgaagatagaaagtggaaaatgtgaatctggatgctttttaatttttttcctgtgttctaaaaagccacagaagaagtcatgtgaataaaagacataaatgttagtgaatggatttatcatttttaactgtgccagcttcttggtgtaatgcttgagcattagtagttaggcaatacattttaatgagtgtttctaacttacaagtgcatatttagaggtgagaacactgtagcacttaaataattaataataaatagttaatatgttcctccagagtaatatgttcctccttctattatctctggcctattggacggtcttcatttatcttttaaagaaggctttagggtttgggacccaaacagatgggaatgtgcccttatttttttttttttttctgtaaatctagtgagcccctgagctgaggggtctttcagaacgcgtactttgtatttgtaggctctggtatctatatactgaaaaatactttcagttgcaatactttatgtaatgtcctaaaaaatgtgttttcaaagacagaaatcactgctatttagatggtttatttttctagagcaaatagttcatagtattgactttctaaagctatgtttctgtaagtgttcttttagtcatgcaaattctaaagtcatttgaaggggatcttacagatgtgctttgttattttattttcttaaattccatcctaaattgggtctgagcatattatggtggaatggactaggagtgaaagattggtcgttctggtttgccctgggccatccaaacagctgtgtaagcagcaggtcctggaaatactgggctcacgatttttggatatgattcagtgatcagcatgactccactgcaggacctcactcactgcttgtagctgtttctctgtggtcattctggaagtcaaaattcaatatgaatgccttgtgagaaatgcttttaatgaactataaaaatcagcagtctgaagagaaggtcatttctgatacagtgattatagtcatttctgcacaccaatgccaattaaagactatagatatgtaacaagcaggagacacacactattgcaacggcagctgaattatgacaactgacaaagcacatacctggaagttggtgatttcgctatgaaaagcagggttcagcctcctgtgtttcacactcgtctttcaagtgccctcacagtgaactctccaaaatgctttaattttaaaaaatcattttgaattcatggacctagtgattgtttatatatttttttagctccttcagaagattaaatatttaagatttttttttagatcatggattcgtgcagcttttgaattcttttgaaataaaattgctcttaatgagacatctgaaaacatgaacaaacactgaagaaacagagttctccagaataatgatgctattgttaagtgattgaatagttgggagattaatatcatggtgtactggcatgttggttaattctagccataatttaactgtaaaacctacttaaggaagcaggaggctgaacggcatgtcaaacacaaggcacccacacatagagctcaacacaataacaaattaagcactgtttatgtacagacatagttggccttatgttttttttcttaatctgtgatttaggtaataattgcactataattttaactctctatgcagtttgaatgtctgcttaattgttttattaccattgtattcagtgatactaattgatggtgccagtgaaatttagctgtgtgtccctaagtctttatgcacataagactggcattgatttagtcttgatagcatatatcctgtttctgctagattactctaaaattgtttgaccaaaggctatggggaaattttggcccaagtgaaaatgtataatttaatttgtgaagagttttcatatactctaagcttggcttttcttttccttgaacattttgccaaattccctaaatgagaccaaagtgccttttgcttaaattttggcataccatgaaatgtctttctgtattagctatagattatgtgaacctgttgctgtacaaaatcatgcaaaagggaaagaaaacaagagtctcatgtaaagttcaaatgtaccatttagctacttcagttttagtaattgcagggttttactaacctgaaaagttatcttgactcttaacacaaaattaatttctccttgtacctaagttcaacaaaaatgcatggaatttcatgagtttgcgtttatgtgcttacatacatatgtgtgtcatgaagctgtgtttcagacagtgataataaaatatccttagtgatctaattaaaatgcagattctggttcagtatgtttgggatggtgctttataacctgcatttttaagaagctcaaggtgatgccaaagctgttgttccacagaccacactttgaataccaaatgtgaatttggtaaaatgttcaaggaaaagaaaagccaagcttagagtatatgaaaactcttcacaaattaaattatacattttcacttgggccaaaatttccccatagcctttggtcaaacaattttagagtaatctagtagaaataggatatgtgctatcaagactaaatcaatgccagtcttatgtgcataaagacttaggcacacagagctaaatttcactggcaccatgtattagtatcagtgaatacaatggaaatacaaagctaaatttccataatttggaaatattagctttccaaaaatatgtaaaaatatgatactattcacttgaataagtgagaatctattaagaacttttttcttggtagaggactaaataatgctttacctctttgcctgttggctacagtttaatctttcaaggaatgctattgacactttcagcaacttggtttctccccattactgtggtctcatctatataaatgtatatatgtgacaatgaaaatggcttcaggaccatgaaaaattccataaatttggttgcttttatacattttatggtttttaagtgaacttaggagtctaccggcactctacatgctgaaattgttgatgtgcttgaaacattccattcatcaaaaagaaacagtggaccagaagatctctatgtcctctggcttctgtggtggcagattccccagaaggcttgcggtttgatgggacttaagcttgtttagataactgcacacaatacccatatgtacctccagaaaggctcagctttaaatgcagccattacacttagaaaaacatcatgtggcattaacctaatctggaataagttaagtagcttaccctaagtacgtggtagaataccgtaactttgtaggactgggctttggggctttccagtacagaaagccttataatatgtaatctttgagaaataacttaagatggacacttaattgtatcttctaattttgtctctgtattaacaccgaaaacatggttttatttgtactgttaaatatttattgcttggattatttcatactctcctaactagtttatttcacataaaattggcttcctttttcttttttctttttgttttttttactgatgtttgcttgacagtctcatgaatttggttttctaagctagaaaaatcttcttcagacctaatgtaaataagctacctgaaattaacaaaaatcttatggagacagaaccatctaaagaaaaagtgtttgaaaatgaggatgctctctagataaagtcattttctagttgctatttttgtgtgtatattataaccaaacacacacacaaactcaagatgttcctccaaaagcatggtgaattatagagaaatggtgggacataatattacaaacatttgttctttctaaaaatcagaccacatattggaactagtttatgactcaataaggttacagttcagcattctcgtaaatagcagggaggcctatcttgaaatgcctaatttagatttgtccatcaagtttcattaatgcattatttattattctgtaaagcctagaaatcttacaaatagtgataacattttaactcatagtatgggaaatattaaagaattctgcatcattaaacattggtaaggctgtggagaaactattattctgttggtaagacaactactttgggaaatgtgttctgcatgcttcaatgatcccactcctgagcagataccctagtaaaacttctgcacatttttaccagtagatagatatgagaatgttaataacagcaatgtttataaggacaaaaataaagggaaggtgtttggataaacctaagtgaaaacagatgggagataggataaataagttgtgaattatttgtttaatgggactctataaaccattgaaaataacagaattgcagtctcttacaccatcatgattgaattcatgattaaaaatgttaagtaaaaaaaaagttgtagtaaaatatgtaagctatggctcatttaaatagacaactaacatgggaaaaactaaaccatatatatatatatacatacgtataagaaaacaataagaaagacaagggatattttgttgcagagggatattttattacagaacacagggaagcagataaaatgtctgtggggaaaagtggaagaaatgaggttggacagaggcaagcaagaaagttcacaactaagccatgtattctttaaattctgtcatgtgttaatttttaattttttacatcttttatatatttataaaaagcctttcacatatttaatactcatgtatatataaatatatacatacatatttaaataatttatatgaaattatataatatataacctatattatataaaattatataatatgtaattcaatgattaaaatatataaaagaataatatactgattatatttaatttaaacttcaataattaaatatactgaaatataataaattataacacaaataaacaaggtagtatttgtatataaataaactaaaatttaaagatatccatgactaaccccaacttttaccttttgcctgtaatgatgcggaaaatgcatgttttaagttttttgaatgtctgttttaaaattgcaatttgacagtaaatactttaaaatacccagcaattatctaacatgcaattgaaattctatagtttcaaagatcaaaagaagtcttcagaagtcaaagactcaaaagaagtcttcagaagacatgtcacttcttacatgtagtgaatgaattctttcattgtatcaacaactttaaatagctatatcagttattctctaacaagattaaatctagttgcttattgactccactgtagtgtttgtaggaagaagtctttctataagcacacatacatacaaacaccacagatttccatgctttctgatttttttttctagaaacatgtaatttacagaaggaggcaatataggctagctcaaaagatacttatggcaatactaattataaaataaccagtagacatgtacattggtaaaaatcagctgctgatacttgcattagtttgaagtttattggaatgcttatataccctggaatgaagatatacttgaaataaaaatgacagtaaaaatgaattaaatgaattgtcacttatatattcctgacattttttggtatttagtaacttatcacaatcaatcaataaacaaacacacaaataaatttaataactaataactactgattccctcataagtgtgtaaattataaaccacccagtgaatggcattagttactgcttacttaatgcctgcttgtttgtgtgtgtaacttgccctgataaaattttctaacagtactaatagatatttatattaaatacattgcttttggcactggtcaaacttaaaagtcacgtggacaggtatggaaagtgttaacgccagatacaaaataatttatgtaataagattaccactgtgtgaaacacacaaacaaaaaaatatatagaaaagaaaacaacatagcatatctgtgtgtgaaggagttataactaatttacatgtttctgtttttctgcattttccaactctgagtttatgggatatgttccctctatattggcaaaaataatcaacttatgtcagtactcaggtaagaagtaagctgaagacagttaagagaatttcatttttatgggcatgcaatgtagcttttcattcatttaatgttaaggaaagtagaagcaattatgttcctgtggcatgtgaaaagtacacacgacataaatatatcaacttttactttggcttccccacgattaaagttaagacaagcgaacaagaggccacctcttgagcagaatatatttcattttgttgttaggtgaattccatcatgtaatgcacatctgtaaccacaacctataatccaattgggaaaaatcgtgtagccttgaagggaacctacctggtaatagaatcaggcttatttataagaaataaatatgggcatacagcttatatactatgcatctcaaaactactatttttattgctgtaatgaattttatatcatgaggacttagtttttttttttttttttttggtaattactgtcctttgatatggctttcatattgtgtcttcttagacacaataaaatccaatatgttatctgataatttattctcatctctaatgtgtacttctgtttgcatattttttctttattcagcttgtgtcagatggttctaaatttaaaaagattttaggaactttaaacataacagttaaatttcctgggagaatgatgaatagaaagcatttcatacttctccatgtctatgtatctcatcctcactagaaaacattgttagcttctgccatcaatgctactactttccacacatttttattgaaaagtaacaagtagatagaaaattgtactaatcgtcagtgtatagtttgtattttcacaaactgaacacatccaagtaaccaccagccaaatcatgaaacagaacatgcccagcataggaaaaaccctttatgcctcttctaattttttttttttttttttgaaatggggtctcgctctgtcgaccaggctgctggagtgcaatggcgtgatcttggctcactgcaacctccacttccccggttcaagcgattcccgcctcagcttcctcagtagctaggattacaggcgcccgccatcacgcccagctaatttttgtatttttagtagagatggcattttaccatgttgatcagactggtcttgaactcctgacttcaagtgatctgcccaccttggcctcccacagtgctagtgtgtccggaattggtgggttcttggtctcactgacttcgaatgaagccgtggaccctcgctgtgagtgttacaactcttaaggcggcgcgtaccttctgatgttcggatgtgttcggagtttcttccttttggtgggttcgtggtctcactggctcaggagtgaagctgcagacctttgtggtgagtgttacagctcttaaggcggcgcgtctggagttgttcgttcctcccagtgggttcgtggtctcgctggcttcaggagtgaagctgcagaccttcgcggtgagtgttacagctcataaaggcagtgtggacccaaagagtgagcagcagcaagatttattgcaaagagcgaaagaacaaagctttcaaagtctggaaggggtcccaagcggttgccatggctggctgggacagtctgcttttattctcttatctggccccacccacatcctgctgattggtagagccgagtggtctgttttgacagggcgctgattggtgtgtttacaatccctgagctagacacaaaggttctccacgtccccatcagagtagctagatacagagtgtagattggtgcattcacaaaccttgagctaggcacagggtgctgattggtgtgtttacaaaccttgagctagatagagagtgccgattggtgtatttacaatcccttagctagacataaagtttctccaagtccccaccagagtagctagatacagagtgtcgattggtgcattcacaaaccctgagctagacacagggtgctgattggtgtgtttacaaaccttgagctagagacagagtgctgattggtgtatttacaatcccttagctagacataaaggttctccaagtccccaccagagtagctagatacagagtatcgattggtgcattcacaaacccttagctagacataaaggttctccaagttcccactagactcaggagcccagctggcttcacccagtggatcccgcacggaggccgcaggtggagctgcctgccagtcccgcgccgtgcgcctgcactcctcagcccttgggtggttgatgggactgggcgccgtggaaccaggggtggcgctcgttggggaggctcgggtgcacaggagcccacggaggaggggaggctcaggcatggcgggctgcaggtcccgagccctgcccctcggggaggcagctaaggcacggtgagaaatcgagtgcagcgccagtgggccggcactgctgggggacccagtacaccctccgcagctgctggcccaggtactaagccgctcattgcccggggccggcagggccggccagcccctccaagtgtggggcccaccaagcccacgcccacctggaagtccagctgtcccgcaagcgccgcgcgcagccccggttcccgctcgcgcctctccctccatacctctctgcaagctgagggagccagctctggccttggccagaccagaaaggggctcccacagtgcagtggtgggctgaagagctcctcaagcgccaccaaagtgggagtccaggcagaggagaggccgagagcgagcaagggctgcgagggctgccagcacgctgtcacctctcactaggattacaggcatgaactaccgcgcccagcgcctcttctaatttttcatctctgccaaggataaccacgatcctgacttctaatacattagtttacataaatgcaattgtagaccatacacttttgtttatctggtgtcttttgctccgcattgtttgaggattcacccacaattgttgcttgtagctccagtttgttattctcatagtggtatggtattccattgtttgaataaacctaatatatttatctgttctattattaataagcatttgggtagtttccagttttaggctgctgatgaatattcttatatttgtaaacagtttatgtttagtacaagggattactacaagaaaaaagaaacacagcttccctaataattttatctgatgtggatgtagcagaaaaaagattcaagtttaacttttcttttaagttgattgtttacataggattaacatcctcatttttgcctattttacaacttatgttgaacacctattttgtgctgtgttttgtgtgatgactgggtgacacagacaaggaaggcacaatttatgttttcaagtaactctcagaaataagtatgcgcttaccatatagtagggacagtgctacgaagaggcgtactggtctagaagaagcttttaattcagctaaaagaaagatggtgagtgaaatatttatagaggagaccattaaactaaaattagacaaagcaagttgtgagtagagaggcaggaggaaaggaagaaaattcttggctgttggaattgcaacatagcagggaacattttagatacttcccatgattgaatttggttgtatttaagggttcacactggggagtgatggaaatataaagaatagaaagagaatctgagcttagtggggaaaaactgatatagtataaataagatatataaagcattgtgaagggctaaagaattattaaaacacaagaagcttcttgcataattcactgagataatattgcaacccagctgagcaaagtgatacatatggtaatgaaaggtttattaaggtttattatggtataaatagtgtctgtaacggatgcttaaggcataattaaataccaaaattaagaggaataattagtcaagtacaatgcatttgtcagtaagtgattggctttaataagtttcttttcttttcttttttttttttttggagacagagtcttgctctgtcacccaggctggagtgcaatggcgtgatcttgtctcactgcaacctccacctcccagattcaagcaattctcctgcttcagcctctggagtagctgggactacaggtgcacaccaccaagcccagctaattttttgtagttttcgtagggatggggttttactgtgttgctcaggctggtcacgaacccttgagctcaggcaatccgtccagctcagcctcccaaagtgctgggattacaggcgtgaatcactgcgcccagccaatttctccttttcttatttacaccacaattaagagtggttggtcttatctttcctccaggaacattaccaaatcatgaaacatttaccgtatatctactagacataaatatcctttgcatcataaacgtataaagcacggggtatctcctaaaggattatgggatgtgataggtgcctaagtacaaagattcatagtcatagatatttcaagaaagtatgaaagcagtgctttggattgtgagagtacagaaatcaggtcatattgagagcattatgtggggccatgtgttggaagttagataaatatatttaagcttattaaaaaaaagagttgatctggtaaaaagatctataagacaacattacatccttcctggcatgcagagagtggctgaatttttcttgcatttttccttcagcccatgaccctcctaaatggcacaaacaaaaaggcatcctaggtgtgttctttgtcatgtaaaacatcccccactgactccctgtggaatgaaaggcatgcactcaggggagtgtgcacacctgcagtaatgagaaggattaaggcaaacaagtgaaccagaagtcactgatacttcacttgagacagcactacacaaacttcacagtctactctgtttcttgattatgctttatggaatctaattataacataagcctgaaatttctgaccaataggcaattaaaagattgtgcatgaccccatgaactattgtttttgagtatctactataagcctattattgagctagaagactttacatactcttttaggtcttctcacctacctcaccaccagtaaggtagttatatacattttacatagaatttttaaagttctctggattatacagaatctataaagccaataattttcacataggtagttgaactacaccatcgatttatgcgattatgaattatttagctaaagactggacaatgggctccctagtatagttccacaaggattgatcttttggagtgacaaataacagctttacctagcatgcatctcaaaatttaatacaaggagattaacgtattgacaaaatagctgtggtctctttcacttgggtacttcgtcttatacatttttagaaataagaaaaacagagttattttgaattaaagctggccttgattttatcttttctgctttttctatgtatgtaatttttaaaaaaaaataaaaatcaccttcatggaactagttatttctgcattatatggctttgtgtattttgccttttgtgggttctgaatctttaaatgaagcatgcattcttgtattacttaatcacagaaatgcaatttgagtgttacgaagctcagaaagattctacagacatctcaaaactgtcattcttttacagacaaacctccctgagaaatacatcattgagttatttgtattaggtacttattcatagtaatactcaaaactgcgtatctattaaaaagcttacagcagctgctacagtacacggaatttctcttttagcattttaactcattttttttcctttgagtgtccttgaagttttaaaaataatacaaatttcataaagtattttacagtcagtatttttaaactctgttttcgtttgacccttgagtgatattatagctcactctcttagtggatgaaatgaaggaaatgtgctcaatataatgtataaaaagcaatgtatctttatcagcagagtatgcactttgtcactttgcaaaataggaggcatatcactgtacctggacatacttgactcccatagccatcctaatcatcttgtttcatgttcaaggtgtaatatatggtatccactaatctattcactcatttaatgggcatgtattgatccctgtgtgtagggtcagggatataacaaacaaacaaacaaacaaacaaacaaaattatgctctgctcttgaagaactcatcctcattgttaggataagaaaagatacaatatagtacaatacaatacagtactaataaaatacagcattttatcactgatacaattaatgatccaattgccatctctaataataaagatatgcccaaaatcctattggatcataaccacaattaaaattagctacttggggatgagaaaaaaaaaatgagagatatgtcagttgagtagggatgaggagaatgaggttagtgatatagataatgtttattttttctttttctttttcttttttgagacagggtctcactctgtcacctaggctggagtgcagtcgtgcaatctcagttcactgcaacctctgcctcctgggctcaagtgatcctcccacctcaccctcctaagtagctgggaccacaggaatgcaccacgatgcctggttaagttttgtatttttttctgtagagatgggatttcaccatgttgcccaggctggtctgaaactcctgagctcatgccatccactgaccttggcctcccaaagtgctgggattacaggtgtgagccaccacacccagcgcaaagacaatttggaggaggttagaatgaaactaagtgacccatgccaggcttgggagctaccacctcattagcaacatataacttctttgaaaacctaatatgtggtttggaactgtgcttgcagatacagtgagaaccaattgtcagtctatttgggctactatagcaaaatgctacaaacctggtggcttatataatataaaaatttatatttcacagtgctggaggctgagaagttcaagatgaaggcagcagctggttcattgtctaatgagggccccattttctggttcctaaatggtgccttccagctttgtcctcacatgatggaagtgacaaggtagcttgctgggccctctttcgtaaggggactaatcacattcttgagagctccaccctcatgacctaatcacctcccaaaggccccatctcctaacaccatcatattagtgattgggtttcaacagatgaattttgggaaaatacaaacattcatactgtagcaccaagaatgtgctataaacagctgacttccactctactgaaatgtggctctgaaaatggttacatatgttgcagatttaatggagttttctcttaaaactgagactgtagatgatgtcaggattttcagaatcagatttgatgtcttctcaaatagcagatgtaaaatctgctgtgaagctatgttttccattacgtattcggttgatgttggatacacagttgtactagaatgtgctacatattgtgaagccataagctgcttcaaggaacaagtttctttagaaggaagttctaacaagcagtggtaaatatgcagctatgttatttccaaggaatgttggtaatttttctgcgttttaaaggactagtcatgtccaaaatttgcaaaccttacacatgtttttttgtggcatcttgactggccagaggacttaattttatctgagcttattcactatacataggggcagcatgaaatcaaagaaagagtaagattttgaagccaaatgtaattgaatttaaatataagcaatataacttaagtgctgcatgaacttagtcaagtaacttaatatacctaaatttaattatttcatgttaaataaatgaaaataatatcaactaattatgtaggcatgagaatttgcaataaatatgtatactgctctctgtcacatagcaggtgttcagttaatagcatatgtaatgtatatgtgtatgtgtatatatattatatatataatatacaatgtatatatacatgtaatccaatcattagtgggtgtttctgatatggaaaatgttatcaggtccataaaaattactgagaaatttaaagatgttcatggaggcttattatgcatcaagctctatactgatctgggcctctttaaaatgaaggtctcattgaagagaaaatctcatgggggaatcaacagacaacatataaaataataaatatataaataaagtactgggtgctttcatacaggctgtgagcacagcagctattcagatttgagagaaataattggtgatcaaataagtcaaaacatggaatttagttttgaaggacctgtattatttagcaagaaaaggggaaattagacaatagttccaagatcacaaacagattcttcaggctcagtcagcttggaaatttttttatttttcctttgcattgctttgtaaaatctctaagccaaccttaaaaaattgggaaatattgcctaaaaatcaaggtctttcaaaaaaatcagaaggcctggaaatgctgagattatatttgtttatggtaatactggttgagctgacaagcagatgtcacatcagttgaagcgtaagttctccaggtcctcatggtctctatccagtatccatttcaatacctgactagtttctgccctaaaaatactttcagagaaaagaaaaaggcgaagatggtgagttgaactttgttgtgtcatttgagatgatcattcagcatacaaggagaaatatctaataactctaactggagattcaggactgaggattgagggcgaaggcagatctggagaggaaattttgagagtgaaacacaaagaaatgggaattcaaagcatgataataaagaagatttgtaatacagttgttcttaaagtgtggtcctgggatcagctcatgcccagtctcagacaaactgaatcagaaactcgggggttgaggccccagatttataagaagccacccagatgttccaatgcacattacattttgagaattattactgtagtggatattgtagcaccaaaactcaactggactgaggattcagcttgtctacacacactttctggaacatgatggaagagaaggggtaagtgatggagataagggaaaaagtacaggcaagaaaaaaagaaccagatgaaggtaatgcatggatcccagggaaaggatatttcaagaggaagctatttaggaggtcaaatggtgccaagaagtcaatgctagtaactgaatatttttaccaattagaaagttactgttcacttttcaaagtattgttccaacagaagtcagtgtttaggaattaagcagaaactggataatacaaagaaagaagtagcttgagtagagcaatcattcaagaaaagtctggcagtaaatgaaaagagagacaccctatgataaccagtgtatggatggaaaggatttgcacatgtttaagggcaggcagaggggaaagagccctggcatttgggaaaaagcatgtacatttcagagaaatataggtgatagataggggaacaggtcacagacatcacagggatgaataccaattggggagaaaaggagaagcaggtcttcttttgagacaggagaatggcaggtggcactagagctgagaggcaacaagtgttggcagagcctggactctgtagctggtctgtctgagattggatcctgcttttgctacttcctagtcatgtgaccctgggaaagttacttaccctgtggctagctcagtgtcctcatttgtaaaatgtagttagacatagtgcctccctcatgggtttgttgcaatgactaacatgagttgaaaaatgtagagaacttagaaaaagggctagtgtctaggaagtgttataaaagtaggtgccagctaaatgaaacacagtggggtggagatgagaggctttgaaagggatacccatgaattcctgagagacctttaaaacctccaaaatctgaaagccacttacataagaacttgagaattgatactacatggttaggttctagaaggcaaatggttctggagatggggtactgttcaagatcaactatgcatgaacaaatgagaagttgatggcagtgagaaccaagaaatggtcaagatgtggtcaaccaggtataatggctttcttgggtgatggccaggaaaggagacaatagaaaacagggttgaatagaggtactgaagtagagcggtggatcctggtggaaagattaggagggacaagcatatgggaaggtagtggagacagcattcaagtggcctggagaacagtctgagcaagtaactaggtattggcagaaggagactgagtgagtgaagaagaaactgtgaattgacttggagtacaaattagaaagcataaatgctaaatcatgtgcttccttggggcctctagaagcattgaacggggacatactggctctatcaaatggtcattagatactagtgtctgagttattattttatgctatacagtaaatgtataggtaataagggagggtttaataagagaaaggaatcaattttaacatgtcacacattgtgctaggagttttaatacatactattttatttcatttttacagttgctatagaaaacagaacatagtaatcatacagatcaaggaacaggtgctgaggggttgagtaatttgccctaggtcatgtgggtgggagagttcagattcaagtctatattaattgattctaaacctcatcctctttctatattagttggccaaatattaaagaatgttaaatatgctgaaatgcattggaatcagttgtagaaggtactcagatgcatgtgaggtttctgactctattggtatggaaatccctttctcataaactttcgctaaggtgacaggttatatatatccccaaattacataacccaactatataacctaaagcataacccaagagttactaattctgagaaccagcaaataagtgattttcttttgattttagaacttgaaagtatgcatttttggtctgctatttttgtgccagatttacatctatttctaattaaagaacaaggaaaggcacaaaccagttactaatcattatctgcttgccatttttcctcacaagattttcactgtaattcagtcaaactactacttagcaactagttatttcaagtggcagaagagatttacataggcattgccaatgttttctttggactttgtttctagaaggtatctgaaagcaaatttcaaaacagctatacttgagttgtaagttgttactatattggctaaatgaggaatatcatcaggcaaaactctgaaaaagtacacagtctaccattttctttctttctttcttttttttttttttttttttttttgagacggagtgtcgctctgtcacccaggctggagtgcagtggcacgatctcggctcactgcaatctctgcctcccaggttcaagtgattctcctgcctcagcctcctgaatagctgggattacaggtgtgcaccaccacgcccggctattttttgtatttttagtatagacgacgtttcaccacgttggtcaggctggtctcgaactcctaacctcgtgatctacccacctcggtctcccaaagtactgggattacagacgtgagccgccgcccccagcctaccattttcaatttaaagtattatatgaaggaaaatttatttgaagttttaaaagtagttctccatatcgacagaaagttcccttagtcgagatcgagaccatcctggctaacacggtgaaaccctgtctctactaaaaaaaatacaaaaaaattagccgggcttgggggcgggcgcctgtagtcccagctactcgggaggctgaggcaggagaatggcgtgaaccctggaggcggagcttgcagtgagccgagatcgcgtcactgcactccagcctgggcgacagagcaacttcgtcttaacaaaaaaaaaaaaaaaagaaaaaagaaaaagaaagaaagttcccttagtctctggagtattgcaaataacaaaccacattctttgctgtttgtgtgttagtcttttggagcagtggttctcaaagcaccatcagcagtatcaaccttacctgggatcctgttagaaatgcaaactctccaggcccacctctttatctactgagtcagatttctgggggtggagtctagcaacctgtgttgataagcctcctaagaggttctgctgcccgttaaacatggagaaccacttactttgagtatatcaaactcgaaatgctgtttgtagccctaggttcctggtgaagctctttgtagcatgaaaatagaaatttgctaagtagtaatacactgacgtgaaaaaagactcatttttttaacaattgtttttctaatctctaagacatataaaaatcattcctcattgacaaaatattgccccttcttcaaacacttcctcttctaggaacttttctccaaatctcccagctagataatcttattttgtgttctttgtaaggtattagcccgaaatagtatgttaataaaagacgttttagtttgcacaatagacatgtaaagtttacttggtgtggatgcatgatcacagtttgattatctctccggggaaagaaacactgcccagattacaagaccaaggaccaggttctggattatttgttgtctgctctttgtaacactgtgagacttctaggcttctgttatcatacacaaatgttagatgagaaagagcttgaaggtcttaggtaagagcttggaagggacaagtgcaaaatcattgagcaaagcattttagaaaggtgtcttgtctgatgaatcctctcacctctgttctttttgcaaagctcaggaggccttggagagaagattattgtgttagtttgttagaactgccataacaaagtaccacagactgggtggcttcatgaaaatatattttctcacagttttgaagtgggaaatacaagatcaaggtattggcaccattgctgcttctaaagcctttctctttttcttgtaaatggctgccttctctctacgacttcatatggtctttttgtgcctgtctctgcttataaggacaacaatcatattggattcgggcctatcgtataaccttattttaccttaattacctctttaaaggctctgtctccaaatacagtcacattctgaggtagtgaggattacaattttaacatattaattttgaggggacaaaattcagtccataacaattatgcatgactttgatgacccatttgtagattgaacttgttaaaacttcagaatataaatgggttgtaaacttgtaggtgaaacgtggctgatgtattccatcagagagatagccctacaacattccaactgggtccctaaagctacagatatgctccattaccatcctcaaatgccaaagaatgaatgagccatctagaagtaggcaaacaaccacatttgctaaaaggctaatgtttcatccattaaataaatgtgatacctttttctagtctggtatcaatatagaaggcatgtgaaaaatgagttagctgagagttaattgactgcggagactctattttcagtctctgcctgtattttttgaattaatatacacagtgggtgattcagcaaaagggtttaaaaataaattctttattgaaggatcccaccaatttgatgtcttcataattcatgaagagtagacccataataactctattttctcttcagctttgaaaataaaagatgccattagtttaaattaggcttgtatgtggaataatcaagtgtatcaacaaatatagtttgactcagatgctgtttaagaataaatgccagaaaagaactggctatttctcttaaaaaattaaatatgaaaattgtattgacaagctagggtgaaagtgttttaaaaagttgatagacaatatatacatttataaaattatgaaaactcaaaaatgtaataagcaaatagttactgtagactagctactcttttaaagcatactctttagaatataaagaaaatagaatataagaaatatcattagagacctggctgtatttgaatataaagaaaatgtcattagagacctggctatatttgtagaatacatgagcactcaggatagttggtgaatatgtaggtatggggttgccaaaaagcatctttgcaatgctgtattagggagttcctactttggctagagaaggcccacatagaaagaactatagtgtaaaatatatttacttcatttatttatttcccttgaaaagttcaaacccccaaggaagtagactgtggatagtattttatctcctctagctgtaagaaatgaaaggatagataagtgaattggatttgtctgaaagcttctggagtcaggaggcacatgggacttgtgctcaggtgtctatttccaggcattattcagcaatttggtcacataattttctctaatattagatttctgcttccaatggtgggtggcatagttgaagaaagaactttatgaagacataaggtcttgatctaaaccctaagaagggaaagagtaagtaaatgaggttatatacctgaaggcatacttttttacttcagaaatttttattttccttcggagtgtataaaatcatgtacttttaatctgcagagtagttttcattctaatctactagtatactttgataaaagcataatttcataggtatattacattcgtgggtctcgtgtttatggtggttacgtctttaaaaaaaatctaaaccttatttatctacatcagttgttgactttgcagatcacagagaatacagagccagtcatgcagaaagtacctgtttgtcatcctgagagttcagacatgaactgtaaccagtggcccattaagtaccttctcttgttgtttaaagcatatcctagctttgcaaattaattgttaatgcagaatgttgtaacggagccatggaatgaaattcctgttactccagtcatagtagatgttgcgtcaagtactctgagttgtgttccattgttttgtgattctgtgctgtcggaaagtctggcctagagagtgtttagaaataaggaaatcaagaaatagtatggtttgcttttttggactctgtgtgtgattttccattgatagtaatattgtaataatttctgagaaataaaattctttttctttgtttataaaaaagttacttgtcaaaatactcacaaatgctttccataagaaaacatttaacattttttgctgtaaaagtgattacatatactacatttaatgcagtagaggacattcttgtaatattgatacagtaggacaatatgcatgccattgactattgttaacagtccagttgtgagatgaaatccactatgaaacacagtaatgtttaatttcatatttaagacagagctaaatttcagtttagaaggttcttatataaaaatttcaggaacacctttataaaccaattaagaaggatttttgtcttaagggtttatgtgcctggtgtaagatagttatacctgatctaatttttctttctttttctgatttttacttctcacatattgtattaatggtgcttggtgtggaaaaaaaagatgcagtgacattttcttctcttatcccttattttctactctaagatacatataattttgcaaatatttatttaccttaatagctcaaacctagctaacattacagctagttaatgggtatgattgtaggtacgatgaatcattgtctagtaaagagactgttcaaatatgattttattttactggttattttcccaacagagagactcttggggtgaaatagagctccaaaaagagtgttttgggggagatgggaaagggaggattgggagtttttaaagggaataatctcgtgtggtaataggcatgaggtaatagtcattttgataatatgaaacaaacaaaaaagcttcgaacaggtgagtatctgtacaactaggtagagtgagaacataatgaaatccctaacatttaaaactaacgatgtaaactgtaaatgtaattatcttttagcaaataactttacatgtcaattttctcagtggaattttttgacagtctaagtagtaatgtttgaagctttggggacagaatctttacccccttccacttctcatcattctcagagaatgccgagggctggagacatttttatatagctgatagcagggagagcatcattggaagaagagctaacattaataatacttactctgtgtcggccactgtcctcagcacgttaggtaaaccccattttaccttcacaaaaagcctataaagaagacaatattatcctcatcttatatacttacaaaaatatttatatcattacaaataattcaaatcattatttaaataaatgtatttatattattatagatgatcaaatgatgcaaaaagcacatattacttacttagccaaccaaatatacccaggctaaattaggatttgaaccatgatagtttggtgtctccgtatattcttttaactactatattacattgctcctggagcctaatatagtggattcccaaagacataaatgttgattgaactaggagatttgacatatttagcttctcatttttgcagatgaagaaactgtgtcttagtgaagttgggttaaactctgcagtgttacaacacaaggtgagagtcagagctggatgcaaaccctgttcagtctagcaccaaggtccatgctttcttccatgaatccacagagtgcgatttactgtgatcacaatcacatgtgatcctcttttggctgcctgtgacagcctgacaagtttatttttgaagctcaacccattgcttacatagggaagaacattcctaagttataaagaagaactggtgaaaggacatcatccaggtgtgaaatgggaatccagagcttgttttcttggtttatgcatgctcagttgtgtgtgccccgatgttcattagagtgttttaagtgtcttcaatgggttacaataacatgggtttttttctctctctctctttcaggtatggaaaaattgtatctacaaaggcaattcttgacaaaaacacaaatcagtgcaaaggtatgtgtaagggcatccgtaccctgaaatcttgcctatgctatctgattaatggttcttccattgtggaggtccaggtaccagctgcacaatgatcacaatgcatagtatggaaaacctctttaatgatgccaatgttttgataagttgtatttctagtaacattgctcattcatttttttcattaacaaacaaaatgaaaatcacaaatcagaacaagtatcaaattgcttcagcataaaactaaattacctcctaacaactttggggtgtctgatgtgaatgatatcatcagtgatgcaaattgatttcctatataaaaatgaggaactctggggaaaacttccccatgcaaaacacattttaatttctctgttctttaaagctttagcaacattggttgactatgaataaatttactgatgggcctattgtattaagcttcagctataagcatctcagggatttcagagttggtatcttattaagacaggcttttggttttcctggaaatacttctgaagtcattggactatatctgtggctcatgtttcttcatgtctgggagtcctatattcttttaaaatttgcattagattaattgtggaacctgtatggtctctcttgcatgactcagttcttactggaaaattggaatgcttcttgtaacatgctgtttgttgttcctttaatctaatctttgttgtaacactgaaatcaagaagtatagcacagccacgttcattctaaacactgcctctatttcatatacaaacataatgtgcacaagttttaggaaagaacactcagaaactcctgtatatgtatctcctcacctacttgcataatggtagtcagattcaattcagcaattaaaaaaataaaaacattccacgtcttctataaactcagaaatgaactacatattacaagacaaagaataatatgacatgatttcttccacctcatagattcaagtcctagttaaaaagacaccaagaaaaccaagaaactaattctaatatccttattaggattactatatcaccttaatatatgtgagggtgtaacagcggtatctaaaacagaattatcgacaaaccactgttagaggagaacatagagatttctttttgggaaatgaagtttataaagtcaaggtagaatgggtgagcttgggacaggtggatgttcaggagagagaatttcagaatgtaattgagtagacccacgtagctgtaaaaaaaaaaaaaaaaaaagtactgctgggcgcggtggctcacgcctataatcccagcactttgggaggctgaggagggtggatcatgaggtcaggactttgagaccagcctggccaacatggtgaaaccctgtctctactaaaaatacaaagattagctgggcacggttgtaggcacctgtaatcccagctacttgggaggctgtggcaggagaatcgtttgaacccaggaggcagaggttgcagtgagccgagattgcgtcattgcactccagcctgggctacagggcaagactccctctcaaaaaaaaaaaaaaaaaaaaaaagtaccagtgaggacagaaacaagaaaggggttaaaattgtgtaggtttttaaatgatatcctggatattttaaatttaaaatttaatttaaaattaaatttaatttaaaattaaaatttaaaattttgagcagacaaaatatgattctgcaggtgtttcgtaatgttatttcagcaaaggtgtgtgaaattgaaatataaagggagggagtggaaacaaaaaaaaatgtaggctttaaagccatagtacaatagagaaattagaaaaaaatcagcttaactattactattagggtaataggaaggggttcaccatgaaagtttttaaaggtagagttggctattgactctaacagtgaaagagaggaatgtatgaaacaaaccctacatacatgttgagtcttctgattgggaaagatgcctgtgcctcttggtgaggtaagaagtccagaagtagtagtagtaggttttggggagaaggtgttggacatgctgagttagagtctctggcatggcaaccatgtggaagatgtcaaagaggaaattgtaagaaagcccagggctacagatgctgactgaagtcaaaggaatagataagattaccaaagaataatgtgtagaaggggaaatggagtggagtgaattagggtgggcagttgagaacttggagaacatttgagaagaaagctgggccatggccaagggatgttctgtcactcttggcctgtgggaagcatgtggcatgttagaagcattagaatgcgaattatagtgcatctagacctgcccaacccatatacaaagtcttgggtcagacagttaataatattaatcaagcaccaatcagaagcacaaatactgcacaggtaagcaacacctggaaacctcaatagatagactcataaccggagcggtcaatatgaagggatacttccttatgcagagttttgctcaagcatgctgatatctgttgtcacagtacaactctgaagaccacgaaaatgtaaattgccaacatgcaaaaactgtacccttctataactgtgaaggtttgaagaaaaagggatgtaactaaaaatgggcggtcagggtctccataagcaaattatatagtgggagcgtgggtgcttatcaggacaaattatactatgggtatccttatccttacatcagctcctaaaatccctatccacgctattttgcaacagcttatttaattttctgtttctgtagagagattcctaaaatcagtggaaacagggcctgtgtgctatagaaaacttacctccaaagtgggatgtgtgaagggtgatacaagactgtttattggagaggctaaaagaaaatattagaatttacatctctctttgttttttatatcaactttttgtgaacattacatattaatataatcttacaaatacatagattttaaataaatatgaaaatgttgagtttgctgcttcaaaatacttttatctctagtgatatgaatactggtctcaccaataaatatggaagaagaaaaggagtaagagaaggaggtaaaaaaggaaggaagagagggaaggaggaaagacggggctgtggaacagcctaggaaaatcacttaaagaaaggcatctgtaagaaattggacagcggttaggccgggcgcagtggctcatgcctgtaatcccagcactttgggaggccaagatgggcggatcacaaggtcaggagatcgagaccatcctggctaaaaccgtgaaaccctgtctctactaaaactataaaaaattagccgggcgtggtggcgggtgcctgtagtcccagctacttgggaggctgaggcaggagaatggcgtgaacccaggaggcggagcttgcagtgagctgagatcgtgccactgcactccagcctgggtgacagagcaaggctcagtctcgaaaaaaaaaaaagaaattggacaccatttagaccgtttgccctgagggtaatacgaagaaggcaaagtgatcgtgtgtccattatatgcttataaaagcctcccattgccttgcttatcctcagcatgtagagtctctgcttagcagtggtgagtgaatcacaaccttcatcaagcacatcatgggggaggtgccctgtaagtcagcaaatcatgatcaaaaatatactactatccctttcatgtttttagaaaaatactattttaatgatatgccgatgtatattagagtattttcctttcaaaaaatagaccttgacatagatatgagaagatatgattagaaagacagcaattatagaaaattgtgtataattgttcatgatgaccaagggaataataggagaaagatatgaggtcatggaaaggttcaaggaactgataagaacgagtattgaaacaatcgtctaaatgtttattggaattgccaagaaatgaaacaggagttgtattagaaaaagtgactaatccagaaagtatctgcggagaaataatgggatgggaaatgatactagggatctgtagaccatgatgaaaatgaagactagttggttataaaatttgatgatgtgagattctaaatgggagattttaggtaggggagaaaccatactgagaaaggaggaaagtggactaccacttacaggtccagtgggaggaaggatatgggagaaaaaaaaagaaacaaaactcaaacttgagagggctacaaaggaagtagtgtcctcagggtaagttaggtagtgatgggaaacatgcaaattaaagcaatatgcagtgatagtttataacccctgaagtagcaaacattataacatgtaggccattcatgctgttcactctgaaactggttcatccattcttcattggtaccatgctaaatcggtacagcttttttaaagtcagtatggaaacagcaataaagagcatacagttgaaactagttagtctgttgagaatatttattcaaatatgttatctaaacatatgttttaaattatgtatctacgtacaactttgagcactctcgttttccttactaggaaaaaatataggaagcatccaaattctagcttatggagcatatacaactgttatgtagctgttaaaatggtagtcataaagactagattatgccaagcctagaaaaatgtttattatatgaagttaaatcaatataaagggatataaaataatgtgtacactgaacatggagctatgtaaatatttgagagtcaggatcagtgtggttatgactgtggtagatccaggctgcctgggttgaacgctgcctcttcgcttagtagctgtgtgacctgtggtaaattagtcaactgcactgtgccttctgcaaggtaagaacatcagcaaagtaataacagagcctcactcacagtgtgttgtgatgattaacaaagttaatacatggaaaatgtttgacgatatctcctgttacttttgtataaaatactggcaatatcaagcaagacaaaaatgtttgttttaacatggtgggcttatgggtgatatattattattattattatcttaacatttctccaaatctgttctgtttttttgggcaagaaaaaaatacagctcttggaaaaattaagctggttttaattatgtttatattttgattgttctttctatggaacctgagtaactcatgactgtatggttcttcgtttttgtaaaataattccagatgaaaatagtgaagaattaggagagaataacatgttttgctttttaaaataataggcagagattgagtacttcttgaccattgctttatttaggaaagaaattacaggatgtgtgaggtgcctttttcaaacaaaatcattaagagcatcaagactgtcgtcattagaggacacaaattggatttggtcttctctgtgacacttggttttgaatcctttgcaactttatctccaggcaaaggctatacaattaaatctaaacattatgaactgaaggatttgtttatttttatttttaaagacatgatagtaattcaattcttcattagctgttacacgtacagcatattgtgtgtaagttagtctttaccaaggtatgagaaagtccatgaacttgtctccttagagataaaaagaaaaggtataaaaattaacctaatgcattaaaccaacagaattgaatcctattttagcatttaaaagaaaagcttttatgctctcctgaatcccacccacaccctgtaagttagggacagtagtcaggcctaggtaagcttactcacttttttattccggaaggggttatcaggaactttcaacataacctctcgttttcaagattattctttcttgggtggtggctgcatcagctttcattccgtataatatgacaacatacaacaaagcagtcaccatcaagccaaaatgaccagaaattgctgaacaaagcgagtaacagctccagatggggagtaatgaaaaacagaccacagttctcattcagatattcaaacacaaggactaaataagagctattgtacaagacacagagatttgcactgcattttttgcttgtttggcttttgttttcccccatgtgttttccttctggatcagtgtatttgctaaattaaaaagtcagggaaaattaaatgaaagctattggaaacaaggtgtaaatcttaaaagaattcacttgtctatgccttcctgcttttgaaggttggtttcccttttctccctgcacccaccagccttaccaccatcatatttccgacaggctatatgtttagagtagagggaatgagtaatggatattccgtagaaagtttccatgcctattaaccataggatataagagtagatagagtgtgccaaacataccagctcacttctgagggtttgaaatactctcttttgcctttgttgtcacaggctggttaaattatatttatggagcttatgttacctttgacataacattgagcccttaaaatcaaaattggagacaagtatccaaaagttctgaaatcatccatgaaggatattcattcattcattcattattaaataaaatcataaattgttatttcttctataagagaaataattctgcatatgacacttattttatagagaggatttagagcccatctagattgtctcagagagtggtgtgactttgttactggactgaatccatttagcagttctaaactcacaatcatgttatacattttgaaagtatttctaggtgaataaatattaggccatacacttggatgactttggaattcatcaattttattttacttttcttgtttatgcactgatggaatatttatacatgtgagggaaatacatatttctttctttttttttttttttttttttgagacatagtcttcttctgtcacccaggctggagtgcagtggtgcgatcttggctcactgtaacctccacctccagcaattattctcctgcctcagcctcccgagtagctgggattacaggtgcgcgccaccatgccccattaatttttttttgtatttttattagagacaaggtttcaccatgtgggccaggctggttgaactcctgacctcaagtgatccacttgcctcggcctcccaaaatgctgggattacaggtgtgagccactgcgcccggtcagaaatacagatttctgtgttgaaccccctgaatctggaaggagggcaggatattatattttgttatatgtttaggtagagtaattacaggacatgaggtatcctttacctatggattagttttaacaagtgacactgacatgcatttgtggtgaaatgtttaagtggaactatttaactctggcggataacagacatttccagggctggtccacatggaaatcaagcaagtaaaggaagaaaccaacaccatggaaagcctcttttctagtacctttatttcttgaaagcagtggaaactaaaataaatgttctgtgaaatttatgagtgtgaggaattacattttgagaagaataatcacctccaccaggtgggctcacagtctattgagcaagaagctcatgagaagcaaaatggcttgaaaaacacatttattcaattttcatataatgggattaggtataccccgcccacatcaaaaaaaaaaaaaaaaaagaaaaaaagaaaagacaaaaaaaagttatattttaaattatatttctctttggaatatgaagtgtgtaatatttccctagcctttttttgtgaattttactctaatctactctagtattaagtttaccaccagtcataggtcatcaatatataaacttgaaggtttgctttatttgattttgatattggcttttgttttcatttcagaaaaggttagcatatgcaggaactttggaaccttcattagtgcatcaagtttactcagaattgtcctgtaggtacattttacgtagaatttttatcctgtgactcttttaagaaaataccaatttttcttgtcttacagccaagttcggaaagaatatccactttgatggtaaatggtctttatttgttgtctacaacccaaccagacaactacaactaaaggcaatacttctgccaaaaattagctttccaaacttattatttccaatatcaggatattaattatgttatgattatttagtgttaactttgagaagtccttgatataaatgtaaaacaaaataggtatttatgttttggaagtcatacagctacacgtttttcagcaggttttatagctatatatttactcagcatttgcttgtaatcacttaatatacatattagacaaaagtaaaattatccactaacatgaaatataacatcagcattgctgttttaagcatcaacttgtgttcaatagcctttagtattgtaacctacttccctaatgcttttgtacatgcagaacgtgcagaaatgattttattgggaaaacttttttttttttcttgttttttgagacagagtctcactctgtcacccaggctagagtctcggctcactgcaacctccgcctcccgggttcaagtgattctcctgccttagcctctcaggtagctgggactacaggcgcattctaccatgcctggctaattttttgtatttttagtagagacggggtttcactgtattagccaggatggtgttgatgtcctgacatcatgatccgcccgcctcaacctcccaaattgctgggattacaggcatgagccactgcgcctagcctgggaaaacatttttaaaataattgttgaggaatataaaacagcttaaaaataaaatgatagagttacattactttcacccgtaaaccgaatgttacttttactaatccatgttatctgactaaacagaaactgtcgtccaggtattctgtttgcttccttgctcctgtctttcacttccctattttaagaatttgactcatgtcgataaacataaaatgctctctcttcctacctctagtagtctatgtaaattattgcttccaaaagtcaccttctcaaaaagtcctccaagactctactcatcctatctaaacacctttacaaaaccacttcctttgggcaccatctgtgtgcaaagatctaaggataccccatctctcatctctcatgcttttatgattagtttgtgtccttcctctagattataaactccctgggacccaggtagttaggattattgccgaagtattgaggatgcaggacagttctgagtagtcacttagatcccagtgctttacctctgtctctgagaccctttgatgttatatcaatggaaagcacaagcttggccaggtatgtgttccataggcctgtacagacaggaagagtaccaaagacatacagatgcatatgtttctcagagttattctctaaaagtattcatttttttttttttttttttttttttttttttttttttgggagacagagtcttgctctgttgcccaggctggagtgcagtggtgcgatctcagttcaccgcaacctccgcctcccgggttcaaacgattctcctgcctcagcctcccaagtagctgggattacagtcatgcaccaccatgcccagctcatttttgtatttttagtagagacagggtttcaccatgttaacctggctggtctcgaactcctgacctcaggtgatccacctgcctcggcctcccaaagtgctgggattacaggcgtgaaccactgaggccggccaaaagtattcattcttaattcagagtacttattttgttaatgtggagttattctttttaatggtttaaagctatttttgttcattaatgattttattaatacatggcaaattgtatatactaatgtatatttaaaatgatatacaaaatataataatgtataatgcacaaatatgatatatgtgtgtattcagttcactaaaatttatgtaaacttgtaatactatgtaaataaccttttaaatataaaaaagacacagttcttcaaaaattttctaattgaagtctataccaagaaattctctaagttatgatcttagtttccttggacaaggcacataacatctctgaacatctgtttttcaactgtcaagtgaggttatctacacctgcaatacaaaggtattttcagaactacatggaaccatgtttgttatatgccgggcacatacatcaggcaaatgtttctatggccttggacttggataccttctaggaaccaacttgtttagagcttgtatgtaacttacataatttaatgccattctgagtacattttaactgtaagaaatgtgtgttttatgaattgacttgtgtttattgagattagcttcgttaatagcaaaaagtataagtacttaaaggatgtcttaaaggtatgaaagataccttttggtgttggctatatgatagcttcaagattttttagggcctataaacctggtgtgtttgagataaagcaaattccatcgcagtgacaggtgatggaattcattctagttgagttgtataggttctgggaaaaaaattttctttgttcactcctttgttatgctattcactctgtaatattgttttacaagtttaaaggaaaaaaatgcctaaagattcttgactccttagttttttaaactatggtaaaagcatctaacatttaaggcatggtcaatcatcatttgctttggtgctagccattgttcttattattagttaatcatattgattctaaatagctattctttttccttccctttagtaaagaaaagagaactctggggtatgaaagagaaaaactcatgtacatagctgaaaaacaaaacaaaacaaaacaagctacaaaaacctaaatagagtttgaaaggtgaatgtaccacttgatatgcttcttcaaaggactataagtgagctcagatgcctgcttatctataaaatattggcaatataagtactttaatatgatcattttagaaacaggtataattttctccttgagttgtggaataagagaaaattacaaagttttcatttaatttctacttctcttaagaaaagggcagtttattttcactgctaggcatacagatagacctattggtcattcagcggacaccagccctgaattagcagaaacctgtatcataaagcatatttggaacactttttctatgccacttttaaaaacacaatttctttcgataaacaataggaagcttaagctgcagatatcacagctgttcatattctcagatctcgtccacaattcaaacagcagcagctgaaacaaacgattttagggaagcaactgtcaaaaaacacactgggccttgggcttaagggtagtgtgaaaaataaccatatttgagatatactgaatgaaatcatgtggtgaaattccacgggaaatataaagcacattggaatttatgtctttgggacacatgctgcaatagataaaccaaaaactgtagcttttaatcaatgagaaggattttctttttttttttttgtaaaaaagaagaattacataaggtagaatttgtaggctcattaaaaaaaatagtattaagacactgtggcataaaattttctcaatcttcccatacattcttttgaatgacgaggggttcaaagtgagaaaattcctaatttcacatctaagatataaggaaattattggtaatactatttctttttatagggaagcagatgataaaattgagaatatgacaagaggacaacttaacaagtcaaagattcccgtatagaaaatagaaattttctcagtctatctcaatttctggctattgttttgaaccaaataagaataactccaagtgaaatataaatatatatatataattttattatatatacatatatttacatatttattctacatatatagtcatgtattacataatgatgttttggtcatcgacaaaactcatatatgacagttgtcccataggattataccatgtttttactgtaccttttctatgtttagatatacaaatacttatgattgtgttaccattgcctacagtattcagtattgcaatatgcggtacaggtttgtagcctaggagtaatatgctataccatacagcctaggtgtatagtaggctataccatctacatttgtgtaagtaaactgtggtgtttgcacaataatgaaatcacctaaggacacatttctcagaatgtattcccattgttaagtgatgcatgactgtatataattacatgtgtatgtcagtacatctgtgtgtgtgtgtgtgtgtgtgtgtatcacagggacaaaacatttatgaggtatttttattcaaagagagtttaaaaattgttatataaagatttacctaaaagtttatattttagtttaataaaatgtaaaaaggaatcttgaaatgaaatccccatagttctttgtaattaagcatctgctatgttacataaaccgaaaagtcctggggaagttgttctgccttagggagttgtcaggttctttgtggttgtctgctgttgtgagaagtaatttaagataagtaagaacaagttaacactgcatatacaattatctaataaaagcttgttcaagcattgatatcatgtgtatatgtttaaaatctccatgaaagtttaacacgtccactttgtatttgccacatattatgtcttattaatatggactattagtacaactaagtacattcctttatggtgtccaggtcagtctatatttccactctgtgcgtctttcaaaagttactagtttagagccaaccctttgtctctgtttactgttgcagacattttaaaaaattcatataaaatatatctttccagataagatggttccagtttacaagtgatcttctgtagacaatagaaagccagtatcacacgtaaatttgtgaaaacatccgacgctgttgcaagcccgaggttaatttatccgttttaggaggaagacttacggtgcttctgttaaccgcagccatttgttgcatcaagggtcagccctatctgcattagcatttaccaacatctctatcttttgtttcctgtctgagtttacttaaatatggaaggtaaactcttcaacctatctcccatcagcctatcaaccaaccaatcagtggaccaaataaaacagactaaagaaccaatacccaaactcaaaacataaacataaaaatactcaaaaaagaggggaaagtcaatcctaaggggagggatcatgaatggtgtctttggcttgcttgcccaggagagacgccctacttaacagtgagcagaaaatgagtaaacgaagagctgtgtagtcctcagaaaaatggttcgcggtagttatggtgtcagagatatatttatactaacatactctgcagctcagccccatgagcatactgagtctagaagtctcttagaacattcctgtaattcatcagaagggcaaatttgtctagggaaggaattttgtttggctacaatactgttaaaagtatttaaattagaatgccttttagcgggacctaaactatcctttattttcttaaaaccagcccgcttcactcatttgtatacctgcttggccattgaagacatgtgcatcttcaactttcaatagcctataccattgttgaatggacatcaagtaactaacaaaattattattattcgcattttactcatgaggaaacaaaccaggagatgctgtgaaatgtgtcaaacatcaaatggtcatccaaacctaagtctgtctaactcccaaagcataggtctctccactgtttcactctttctcccataaaataatcccaataagtaagactagaagtaaatgatcctggatgtttttaatgacaattagacacaagcacaatgttttgagttcgcataaaggcagacaatttgatagaaacatgtagtagttcttattctcccacttccatcccactataaacagtatcgattaggggttctagttctgtttgtcactgaatatagatataaaaacatggagctggcactatgaaagcacatgttccttttgaaaatattttgatcattttgttccatttaaaatcattttccttttttatattttgagaatggttttctgctaacttcaattttgcacttatgttggcaaatgtctagctttctatctaggttaactttaaagtgagctgcagttaaataaattttaagtgggaaaatagcctcagaattattgtggtagaaagacaaggtgcagctgatactttctcttactctcaggactcagaatgagccatgtgcttctttaaagggcctatgtggtcgtttcagagcaaatgctctctttcatcttatttaagttctgtttggcttgcctcccatatttgctcagtggggataaggttaagacctctgaggaggccactctatcccaattacttacccagtctcttttcttttcttcaaatagcttgcgtgtagttgtggagaatgtttgggggtcattatcttcttgatggatgaatccagagataaacaaacattttctatttgaattctaaaggtatgataaagtttaatccaaagacttttatgttttgaattcatccaggcaccaattcttgcagcaaaacatccaaacgcctgctaaggccaattatttcttttgaaatctggtttttctcagaaagttcttcccccatccacgtagtttcctattgtctcaagttgccctccagcctctaattcttaccgagatttaccttgtcattcattcccttctgtcctttacggaaatgttaagcatctgtgctcagtttttttcaacagctatattcaagcacatgctttatttcctcgtactcactctagattcccctgtccaagtttgagtctgaatttttacagtgtttagattctaactacatttctttcttgcctagttcctgagtggtctttctctggcctgacattctacttccaggcaccaatcctaatataactggatcctgctttgggaactgtaaggaggattgttttacttctccaacaccattgtctgtgttaattttgctgataggatttttataggaagcagcataacagcaaggcagtcatttcatatttgtaaccaaaatcaagtaattctcaggtagaccacagatgtattttttcctgcttctttgaagctgaagatcgtttgcaataggtgcctataaagtacctctgcagtggaaaaaataacatcctatgtggcatggcatccctgttcctccatggaaaccacagttagttttgacattgccagaatttttgaattttggggagaagctatggggaaaaaatgtaaaggctttctcatctggatttaactcgagttaaagcattacctgaagctctgtgcggccttgtttgggctttgttctctaaacagtttgtagatgattgtgttcagaattcccagcccacattagctaactgcacacatgtggaaacacagagaggctatgacctttagatccactccagaaatacaaacttggtctctaagtttagagaggaaattcttccctctcactagccaggatctgggactgatgttttgcccaggtcacacatatgtctgagccgtgccagttagtaggggaaaaaaatgacctcttgggtaatttgtacgtcatgaagacttggctctgtcttggtccagggagcagcagctcatttaaagtgcacaggaccttatgagttttagggggccacaaaacatgaacccaaataaagtggaaatttgtgatgattggtctatgagaaggcaaccataaaaataatttaagaggcagtgagcaggcctcttgcctttttttctgtctgatttatttatttataaaattttaattggaaaattaaaaattaaaaaaggttctgaaggtagattccatttcttggctattgtgaataattactactatgaacaagcaagtgcagatatctctttggcatactgattctattcccttcagatgtgtacccagtagtgggattgctggatgatatggtagttctatttttaattttttgagaaacctctatactgttttctctaatggctatactaatttacattcccaccaagaatgtgcaaggattcccttttctccacatcctcatcaacatttatctttcatctttttcctaatagccattctaacaggtgtgagttgatagctcattgtggatttaatttgtgtttctctgatgactagtcatggtgagcatgttttcatatacctgtcggctctttgtatgtcttcttttgagaaatatctattcaggtcctttgcctatttttaaaattaggatattgaattgatatatgttaaccccttattagatctatggtttgcaaatacttcctcccgtatcagacatatgttatgtcttcaccatgttgattgtttccttggctgtgtttttcagtttgatgtagtcccattcatccattttcacttttgtttcctgtgcttttagtgtcatgtccaataaataagtgaccagaccaatgtcacagagcttttcggctgtgttttcttctagtagttttatagtttcaggtcttatatttacatttttaatcccttttgagttgatttttgtatgtagtatgaaataaaggtctaatttcattcttctgcttgtggacatctagctgtcccaacaatatttattgaatagactgtccttttgctcttgtgtattctcagtacctttgtcaaaactcaattgactgtaatcacatggatttgtttctgggatctctattctgttccactgatctatgtaatagtttttatgccagtaccatactctgtttattattgtagctttgtagtgtattttgaagtcatgtagtgtgatgccttcaattttgttttttttttttgttgtttgtttgtttgtttttactcaagatagctttggctgtttgaggaatactgtggttccatatgaattttaggacttttttttatttctgtgaaaaatgttattggaatttttatatcaatcacatttaatctgtagattgctttgggtagtatgggcatcttaatagtattcttctaatcaatgaacgtgagacatgtttccatttatttgtgtattcttcaatttcttttatcaattttggatctttttttaatgtacaggcctttcatctccttggttaaatttaattttaagtatttgatatttttgtagtgatggtaaatgggattttaaaaattgcatttttggctattcattgttaagtgtacttaacatatattactatattgtatgttgattttttatccagcaattttactgaatttgtttattagttccaatagttttttggtggaattttttaggctacattatagataaaatcatgttacttacaaacaaggataatttaacttcttcctttccattttgaatgccctttatttctttttcttgcttaattgttctcgctaggggacgtccagtaatatgttcaatagaagtggtaagagtgggaatccttgtcttgttcctaatctcagaaaagaaaaatttcaactttccctcattgaatgagatattagctatggtccatcatatatgtcctttcaggtattgagatacattccttctatacctaatttgttgagattttttatcatgaaaggggattggattttgtaaaataatttttctgcaactattgagattatcatatggtttttgtccttcattctgttaaggtgatttatcatatttatagatttatgtatgttgaaccacctttacatcactggaataaattgcacttgatcatggtgaatgcttcttttaatgtgatgttaaatttgacttgctagtattttgttgaggttatttacatctatgttcatcagggatattcgcctgtaatattcttctcttgcagtgttcttgtcaggctttgatgacaggaaaatgctggccctataaaatgtatttaaaagtattccctctgctgcaattttttggaagtcttgtttgaaaagtattagtatcggttcttctttaaatgtttgttaacagtgaaatcatcaggtcccggacttttctttcatgggaaaaatgttattactgtttcaatctccttgttattggtctgttcagattttccattacttcatggtttagtcttggtttttatgttttagttttatgtgtctaagaatgtatccattttttctaagttatccaatttgttggtatataattgttcatagaagtctcctatgatcctttgtatttttggtatcagctataatatctcctctttcatttctgatattatttgagtcttctttctttttgttctttgttggtctagctaaaggtttgtcaattttgtttgtttaaaaaaaaaaaactcttggttttgttgaccttttctattgtttttctagttctgcttcacttatttctgctctgatctttgtttttttttattctgctaactttggccttaatttctctttctttttctgattccttgaagtttaacattaggatatctctttactatcagctgtatttaaaaaaaaatgaggttcttttatgacctcatttcaagagtcaataaactttccatactctttaggtacatacactagattatgtaatttttttctacagaaataatgttttaggaatagaaaaattatacacatgaatgcaacctttgctttgtattcctgaaaacttggaaataacctaatatgcacaaatagaaatggctaaactctggttaaaactatagagtattttataattatgtaaaggaaaaattgttaagactctgaggcagcatggaaacctagctatagtatgatattaattgcgaaaaaaaaagacaaatctatgtatgctctgctaataactaggtcaaaatgtgaagtatgatggcttctgacaatgtttttacttgatatgtgtaattatcagttgacatgtctctctcctctgcactgtgacttctttgatggggagagcatatttttccatatgtgcaaaaacaagacctagcacataatatgagctaataaatatttctgaattaacccttgaaaaggtagcaaaaaaataaaattatataattgtatccatgatctgaccacaattctctaaacataatgcatttagaaggcaaaggtctaaaggaattgtatagaagtgattacaagggttcttgtgtggtgaggtattgatttttcaatgttcattatatgtttaaaaaattctcctatctataatagaaaacaacaataatgactaaagtagtattagcacaatttagcaatactgagatgcaagaaaaactcattttttcaataatgagaaaatatgaagattcatattgtcattaaaattcaattatatatgtgaaattttgaatctctgttatttggaatgagatgtcaagaaagagaaacttctaactactaatcataatataaggcctctcgtcatctggcttgttctctcctctctaacaccagaaatagtgtacatttgtataatataatctattttttccccatatctccttcttttttaattattatactttaagttctggggtacatgtgcagaatgcacaggtttgttacataggtatacatgtgccatggtggtttgctgcacccacgaacccatcatctacattaggtatttctcctaatgctatacctcccctatccctccacttgccaacaggccccagtgtgtgatattcccctccctgtgtccatgcgttctcattgttcagctcccacttatgagtgaggacatgcagtgtttggttttctgttcttgtgttagtttgctgagaataatggtttccagcttcatccatgtccctgcaaaggacatgaactcattccttttgtggctgcttagtattccatggtgtatatatgccaaattttctttatccagtctatcattgatgggcatttgggctggtttcaagtctttgctactgtgaatagtgctgcagtaaacatacgtgcgctttttttttatagtagaatgatttttaatcctttcggtatatacccagttacgggattactgggtcaaatggtatttctggttctagatccttgagaaatcaccacactgtcttccacaattgttgaactaatttacactcccaccaacagtgtaaaaccgttcctatttctccacatcctctccagcatctgttgtttcctgactttttaatgatcgccattctaactggcgcgagatggtatctcatggtggttttgatttgcatttctctaatgaccagtgatgatgagcttttcttcatgtgtttgttggctgcataaatgtcttcttttaagaagtgtctgttcatatcctttgcccacttttgatggggttggtttttttttttgtaagtttgtttaagttctttgtagattctagatattagccttttgtcaggtgggtagattgcaaaatataactcttgagtgtagggagtattcacattctactccatgtgaatagcatctctagaattatacaatgagcaacctatgtggccatagtgatggctctggtcaattcttatctcttaccacatatccaaccaaccatacctaattatttacatgccacatggaaaaatactttggtgcctgttctctttgcctgtaacgtaacaagcaccccacatttactaataatgactaatatatagtgagcattttctatgtacataaattattctaagagttttacatatatgatagcagttttttcaaattgatataattattgtcttcattttctaggtgaaagagacaaggaacttgcctaagttgccataacatgaaatagcagatttgggatataaattcaggtctgctttgttttaaagcctgggtatttaatgtctcacatgtcatccctcttttatgctgcctgtgtgctcttccttgacttgcgagactcagctgataaattcctcaaagctttccctgtgccttccacgctagcccaagctgcctttggtatccttcctctatatcccttaatacaagtctgttctcccaaaagtatacccagaatttagcaagctgtgtataatcagtgatttttctttattcatgtttcacttaaactatgggcttatcaagagtgagaattgtacacctattcagaacaacaacaaaggactgtatcgtattcatttcttgttcactcatgcttagcacatgctttgcacgtgaagtagttgtccaatgcatgtctaaaagaataaaatgatgaatggcttaaccacatctcagattctcaattcatggttatagcacaaaaaaatgatcatgcatgtgattttggctgtgattagaaactgggataaaattgcagccatttatcacagagatggaataagcacaatttcttattaagtacctgtggactccatacttttgcagatacactgcttctttaaacaatgctttaatcacaacatttggctgcttcaaacctgtatgtgacttgttatttcattctttatcaagtctgaatttctcagtatagatttaaagagcactgatatcatagatcaacccatagtgattttcaccttgttctaatatgtatctttgacaccaagaagaccagtcactttactctcccaacgcgctatacttataccaccattcagtctttactcagctcatactccagctcattattcttcttccattctaaacctgacttagattattaggcaaacttaaattctacttactttatagagggttccctgcctaggttagctcttggtaaagtcccttttctattgcctatgtcaaataatgtaccatatgatacaggttgagtatcccttttctgaaatgcttgagaccagaagtatttcagatttcagatttttttttcaaatcatggaatatttgcattctaattgagcatctcaaatccaaaaactcaaaacccaaaatgctccaataagcattttcttggagcatgaattttgagcatcatataagcaactcaaaacatttcaaattttagagcttttggatttcagatttttggattagggatgctcaatttgtaatattgttgactatttgcagcattgctttagttatgttagcattgtttattttttcctataaagatatgagcagatgctatgcatttctcttgtttaaaattacaagttattgtgtgcccactctgtgctaaaatctattctgcatgttttacaaatattttattatgaaaagatttgagtttccttttggttagtgataaaggagaaaatctttcaacagatgccatgagaactgattaaaataaaaagttaattttggccgggcgtggtggctcacgcctgtaatcccaacactttgggaggccaaggtgggtggatcactaggtgaggagatcaagacctattggctaacatggtgaaactctgcctctactaaaaatacaaaaaattagtgggacatggcggcatgcacctgtaatcccagctacttgggaggctgaggcgggagaatcacttgaacccaggagcagaggttacagtgagctgagatcgcaccactgcactccagcctgggcgacggagagagacttcatctcaaataaaataaaataaataaaaaaggttattttaaaccaaatttctaaaaataagtgtgattctcaaatttaacagtgatcctaataaggtatatgaacaggcgatagcataaaactagttctgtgcgtgggtgttttgtgtcactttaatattcagtatataacatgtggagaactagttttacttttccatggtatttgttggtgcctctgtgagtcacgatgttgggtctactgattctaactcatgtcaaaagacctcaactttatatttagcccaacactgccaatgtctgctgttggaaataaaggggagccaggcaaaagagtttgaatcagcacaaataattaaaattatggaccctactcataggaccatcatacataaagaataacaccccttttgcctttatttggagaatattactcaaccacttcaccatttataagaataataacaaaaatgggattttcacattatgactttaaagttgaaggatccaattgtgtcttgggaaaaaaatgaaagcatatgtatcacaagactaactgaaaacagaaatttcatttctgttcatattcagagccactttgttaacactgtgctcctgggtttggaattccctggagagaagaagttagaaagtaaaaggcaagcgttcccagtaacatttggtttaaatttgcatgcaattaaaatcttatgttatggtactaatattttttcccttttctggtttcagaaacactaggtgtttctgacacatttagtaaaagcctccttttccttatcatttctgactctttattcagatttactaaaaataagagtcaagagaaagaaaaaatgggaaagtctgcacaatgaaaaggtggtcttccttatttttcatcagttagtcaggattatttaccaagcagaggactgctctgtcatttttatactaatttaattctaaataaatatatcaaagatttctaaatgttggatttaggcatttgaaaaaggttttaaaaacagtaatttatcatttagctgcagcatgtgataagtgcaatgaacaaattttgattcatctgacattagttagaattaaattattatctagagattataaatgttgcattaatccttctttaatttaataattaagatttataagtattcacaaatatatctggaataagtaatttaaaaagtcttaaaactttaagatttgatatcaggatataaacataattctatttatttatattttccatttgatatttgatccatcctactttatgactttcttttcatcaagaaactgacccaaagacttgaggattactactaaggacttttcagggaaaataaaaacgaaataacccacaccaaacaaaaagcggcggtggtacagccataatacttcctgttccttgtagatcaatctgggacaaaggctgtctaatatttcaaattctgtggcatgtgaacaatactgtgtgcactgggcttccaaccttggcatttagaatgcatatatatgagcagaggaaaattccaacaatctatcctttctttataatcttgcagcagttccaaaagtccttagctgaaggatatatttggaaagcgctgcttgtctgctctcaccacattcaggtaaccattccagagttcttaggttccacttgagaggtaacttgctattaccatttgtgctatgtgtcataaaagggccctattattttcagcaagacccctcagcagcagttccaaaggagcagctagagatttgattatataggtctctctcctgaacacatcctttcgcatttgacatttacactggtggcggatttttatgtaacttgttagagagcagtctgaaccttagaaaggtgttagtcttcctagaaccctctggcaaaggaaaatcttttattggacttaaatgttttgagttgaaaactgtacttgtttgattggaaaacctttcagggaacagatttcgttatttttctaagctaggctgcaggaattgagccgaagatatcactaaccaaagacctgagaaccaaaggaaatgactccagtgtttaaaatccttttatttcctctgtgaacgatatctctgcaactgagatgaaccattccaactggcccccacccagactttatgggaactgagattaggaagttgtatggtcacaatagtcactgtacaaattgctttcagtttaaaaacctcaaagttcttgacaaagccataatttcttgccacattttattttttcacatgggtgactgatctgtcattcattaattaccctgccaggattcttcagttcttttagaatgatctatatatataataatttcatttgggaggaggacacagagtttgtgagaagtatgcagggtgcctgtaaaatttgtctttgcgagacaccacatattttgcccatttctgttgccttctatttgaaaaaaaatattgttgggccacagtcaagcttataaaaatgtgttcttttcctttcctaatttcattctatactttccttcttgcctagcttttccatagctgagatgaataaaatgttggatgtggtctcaaaattcaacactcctgacttcctttgacacaatcatgccctggggaaatagaatcatattcataactctctaaagcattctctgcccttgctttctctacccaggctggagaatcttattaatctttctattccttgtgcctaacacagtgcctggcatgtttgaaggcactgatttatatttaaacgtgaagtagcctagaataggaagcatataatagattggtaaaacatagagtatgtaaggaagggattattacacactttaaaaaatcagggactgttgtctgaattaaacattgttaaggatgtagcaatgacacaattctccattcttctaaaatttttagtacttccctatattcgtctctggggaatttatgtggcagaatgctctctcaccatgtttggcaacctaaagctactcagacttccttagaggtagtcgctcctctatctcaaaagctttcttgacaagaatgatttgggttggatggggattggtagtagttttctcatttaacatctgcaacacatattaaaatgaactttagtaacctgacatttagcactgaatgggatttacacatacgagttgctcaatctaatgtgatttgatccaacatttgtcaaacatgtacttttggaaaaacactgtgattgacactgaggataagaaaaaggaagcgatttatccccaaatgctcaaggggaggagagataggtgcatatatatatgtgtgataggcacatatatatatatatatatatatatatatatgataggcatacatatatatgataggcatatatatgtgtatatgataagcatatatatatgataggcatatatatataagcatatatacgataggcatatatatatatgataggcatatatatgtatatatgataggcatatatataataatatgaggataatagctaaaaataatacctaactgtcagtgagtactttatgcatgtcagattttcttctaataactccagatgtcttatttaatcctacagaggcccttcgaggtagatgtcaacgttaccagcatttcacagatgagggtaatgagccactatgttcaagatcaatcagcttccaaagtcacagagcctgatagagtccaggaagttcccaaatatatgctcttaagtactatgcagtagtgctgtaaataacatgctcttagaaagaatgaggaagtggtcaaatcgaccttaagtttggaaaaggcttaggtgaaagctgcaggaggaaggtagtatttgagctttgctctccaaaatgaatgtaagtttatctagcagggatagcaggaaaagatttacctggaaaaggaaagagcatggaaatggcagaaagttgttgaagtgcatgacattttctgatgtcttcaaagtgcagtgcttgcataaggaaacagtaagtgatataatctgaatgcaagctcgtcttatggtgaagggtcttgcatcaaggctagggtaaagagcttgttataaaggcaatggaaaccaaggagaggtttataggcagaagaaataatatggccagagtaatattttggaaagtcgattctggcaaagaatttggaatgacaaagaaggaagaaagctagatgcaggaagacaggctggaaggatgtatcctttctcttgcattcatgtgctaataatagaaagaatgactaaacactgacttaaactgtttttcacaccgcataagaaggagactgaaggtaagcaatccagagcagtagggtgactccatctagacactcagcacttggtgtgtacctttcacttcctgcctttgccttgtggttgcagagagctagtccactttagcattacatttgcagtacatgcaggaagaccaggaaggctaaagggcaaaagacaagtgccagctgagtgtgtccttgttcaaaagctttgtgcttttataattggccccaaactgtaacatggtcgtgggttcttaatacccaaatgatgttggaaatagtagtttttatacctaggcacatgccaaaacagaatgccggtagggaagagaattccgtcaaaattgatattggaattgtttatgtgagagttgaagaggacatggaccagggactttaagggtacaaaagataaagtggggacaggatttaggaatgagaatcaggaagacatggggaccaataagatgaggcaggctgggaaggggattgatcaaggaagatactgttgtttctgactttggcaactgcatctgtgatgatcgttttagccgaggtgtggagaatcaagtaagatcagtttttaccaataaaataatacatgtgattcaagatatattgagtttgatgtatttctaggacatccgatgaaaaatttggtaagttgatataaacaggcctagaggtcaggagatgacgatctgagtgtcagaataatctaaaccacagaagttgatgaaatcactaagaaaacacatagagtggcataaagcctgaagactatggagaggaagtttttttttgtttgtttttgttttttggttttgttttgttttttgagacagagtctcactctgttgcccaggctggagtgcagtggtacaatgatggcttactgtagccaagacatcccactttagcctcctgaatagcagggaacacaggtgcatgccaccatgcctaagaaggtctcactgtgttgcccaggcttgtgtctaattcctggccccaagctatcctaccacgtcagcctcctaaagtgttgggattataggcatgagctaccacacctggccaaggagaggaacttttcaagagcaagctgaaaatatcagagaaaggggagcaatatcacaaaaattaggagtaatatttttaaaatgaaatgctcaacagtatcaaataccttagaagatttaagaatgaaaggagatgttgagttagcaattaggttatcattagtgttcagtacatgttgaaacaataaatgcattaaaacatgaacttctagccaggtatggtggtgcaatcctgtaattccagcaatttgggaggttgaggcaggtggatcacttgagcccaaaagtccgagaacagcctgggcaacatagtgaaaccgatctctactaaaaataccaaaaaattatctgggtatggtggcacgtgtctgtcgcccagctacccaggaggctgagatgggagggtgacctgagcccaggaagtcaaggctgcagagcgttttggttgcgtcactgcactccagcctgggcgacacagcgagaccatgtctctaaaaaaagaaaagaaaaacatgaaattctcatctgtgtatgtgaggtgatttcatatatgtgtgtgtgtgtgtgtgtgtgtgtgtgtgtgtgtgtatatatatatattttttttttgttttttttttgaaacagagtctcgctctgttgcccaggctggagtacagtggcgcaatcttggctcactgcaagctccacctcccaggtttacgccattctcctgccttagccttcctagtattcaggactacaggtgcctgccaccacgccaggctaattgttttgtatttttagtagagacgggatttcaccttgttagccaggatggtttcgatctcctgacctcgtgatccgccttcctcggcctcccgaagtgctgggattacaggcgtgagccaccgcgcccggccctacatgatctcatattcttgcagagacagttgtctactgctactgtccactatttctattggacagtatgattttctagacctagggggaatactgggtttttgttagctgttttatcttacagaagatgttttcaataagttaagagaagaaatcatatagaagtcaaggcagatcaaaaacctattgaaagacaaaaattgtagttgtgggaaaaaaatgtcaaggaaatgggtacatactgtgagtaaagttctaagtgaagtcactgaattttctattttatttcctgttcctcagaaattctttataacctttttcttccccctaaataatcattcttgtagcttttgtaaaactgtcttatcttagggtagctaaaaaggcaaaaagtaggcctgttgtgcataagtaagagtaactcacaatgcctacattttttagataatccttacctcttatctctttctgagagcagggcattcattcacatgcacatgggtatatactgagtgaccattaggtgcctgatactgtactaagcacaggttattgggtgtagctagcacctgtattactgtcaagaactgcaactgtttgtggttaaatttggagaaatactaaaccaatatccaccctccttctgtgggcctatacccacttagaaattaatgtcttttggaaacttatagatagaacagttgttattttatgagttatcatgtcatggcattgggtacaaaactaatgcttctatttcttgttttagtcagtaaagtagccagcgccatgtgtggacatgtaaataataaaaatgccttaggaaatatacagagattttattgttaataaatgtgcatggctatctcctgatctattgtatagtaaaagaaggtcattattaaaggtgcatcctttaacagaaaagaatatgaaaacatttatgttttcaggatcaattagcaactctcttttcaccttggcaggacatgtctaaagtttaagtagccattttcatctcgtcaacacatttcataccactttctttattcattttttaaatttggtacaatattccagctcattcacagtttgcaatttgctgaaggcagaggtctacttatacactgtatgttaatatgtagcagagatgacattctaattttgtgtctcaactagcaaagtatccacttcccttataaagaattaattatgatgttcactaaaaacaaaagacaactgtagatgatagggctacttctgtgagcaaagctgttgggggcctggagtgagaagagaaatgggaagcaagtgattgaaagtggacattttatattagtaagatcgtaatgaaccatttgaaggaaagtagaatacgcagagagcaaattctgcgctttgagtgtattttcgtgttccaaaagaaaaagtaataatagcatgaactggcaatgtgacagtgaaattacaatgtcttctgttgatatctgtaacgtaagttggtacaacccttctagaaagcaatttgtccatgtttcaagccccatagatgtgttacctcagcatttacactactgcaaacttattttggtatagaaacttatccaagagaagaagaaagccatctgtagaacctaaatgaggaattatgaggactaaataaggcgagggctgtgtcagtgcagattgagggaattcaagaagggttagaaaggcacattgactccgttgggtgatggaagggacagatgtgggatgcaaggtgaagaagaggaaggagcctagaacgacctccaagcaactgtcttgattcattcattgagaaacaaaatataaaaggagcaaaaaatagaaaggtcacaaacattttgcttttgaaaacagtctgaaaaccactcagtcctatgccattctcctcagatgagggtgtggaactcagaggtcaaccaacagaactcaaatcttagttaactaattgactggcagttcttttgctgtttggtttctatctgaatgaaaaatctcctgcttggctttcacacttcctgtcaactagaccaattaggataacattaagggatagattttactatggaaatctcaagcttggacctcattttccccccaaaatagtatcaaactgccttgttattattaaaatgggagctttacgatagcattcttaagtatggtgatttttttacaccacataataacttttactgtgatttattgagtctgtggccaaaagtctgacccttctgttctaatcacagttgccagataaaatacagatgctccagttaaatttgaatttcagatacataatgaatacatttttagtacttgtttcatataagtatttttattataatgtgtcacatgcaggtattattcattgtgtatctgcaattcaaatgtaactggccatcctgtatttttatttgctaaatctggcaacctagtcccaatattaagaaggtccattcattctaatgatctagacatagcaatggtagtcaaggagccaagtgtagctactgagcacttaaatgtgcttagtccaaactgagatgtgctgtgagtgtaaaatacaaaccaagttttaaaaacctactattaaaaagcgtgcagtatcttgttaataattttaaaattgattgcatgtcaaaataataatattttttatagctagggttaaattaaatatatttaattttacctgttccttttactttctaaaaattcggatactagaaaatttgaaatatttggggcttgcactacatttctattggacagtactgattttttagatttaagggaaatactggtttttcgttagctgttttatcttgcaaaagatgttttcagtgagttaaatatacaccaacagcatagaaagtgaacaaaagttgtgcaaggtttacacaaaacaagtttagccaacataaactgagaagaaggagagtatatcttcatttcgatacatatagtttaataaacacgtagggagggtttttttagatcagaaaacacatatgcactatatacaaattaatatgaaggatgtattatgctttattcctgtgtctcagcgaaacattgaaagtgctgatttctttgtgatattaaaaatacatgtagtatttcttcatggggttccagtcataattctttggtgtttcattctattcaaggaggttaaagaatcttacagcatagacacctaatttggaaggaatctcaatgaaatacctgctaaggtcaaggttcatgtcaaaactaatattaactgttctctctgcctgtagagtgctttccacggagagtctcaagggttgttcctaactgtgttcaggtctccgctcacatgtcatctccgctcacatttaagaggccctcctctgacttattatctaaaatagcaccctgtcactctctcactcttaccctgccttattatttttttccataatactgacatcctattttatcccaccccatccttgattatattaatatttaaaattatagtaagtagtttctattatttttcatctccccagaaaagcttcatgatggcaaagttgttcactgcagtatcttcataacccacagaacttatgaaccctagttcataggcagtattgtgatcctatgagctctctgatatttcctagtacatttatcattacttgttacttaatattttgttgacatctcaaaaactgagtctttcccattttgaaaagcaggaaaatataacttctgaatatctgctcatttgctttctcgtattgggcttctgtactgagtcagacacatggtagatactgggaatacagcagtaatcctatagccaggtctccaggactcaacaagcttacattcctggaaaaatctcactgttactgggagtaaactttctttctgaactggcataccagaaaattgagtccaggatgtacaaatctgtgctaaaaattttgtttgctactttttaagtggacttgataaaatatgaagcacatgctttgtgttcagcctgttcttacctctttatgtacattccctcatttattctcactgtaacatggagtgctatcattatcttcatttttcagtagaggaaactgaagcagcgaaggcatcacttgctcaggtcatacagtcagtaagtggcagagccataatttgaatccagaaagcctaactctggaaatttttaacaaccctgatacataaggttaatgcagctgaccttgtgtatttactaaaagatagctactgttgacctcttcattgaaagtttaagatcatgagttatttaatttggtttggccatgcagtcagtttggaatgttctttatcttcatcttaacataatccagttcattttacaagacctagcatgctataaaattagcgtttagttaggaaaatggaaacacatctaggcagtttatgaagaagattgtttgcacagagaggaaaatctaagaagctaaacagtctagaggagcaatccagaggttaggataacagggaacactggcccacctagttttttgttttgttttgtttgagacagagtcttactctgtcactcaggctggagtgcagtgctgtgatctcggctcactgcaacctccacctcccgggttcaagcaattctcctgcctcagcctcccaagtagctgggattacaggcccccaccaccatgcccagctaattttttgtaattttagtagagacggggttttatcacgttggccaggctggtcctaaactcctgacctcaggtgatcggcccgcctttgcctcccacagtgctggtattacaggcatgagccactgcaccaggctaatatctaggtttcgagggatagtggaaggaagtggggttacaggaagctgctaccaatcctaggtctagaggattgtggcaggagatggggttactattaagtcagaaggtggagccatctaatgaaagctagaaccatgacagggctgccaggtgggagttggtaccaggaggaaacactgtaggagaaagaaaaaccttgacttctccttttcttcagtcttttattcgtctgccaatactacccattggccaatcctactggaatctagttgacaaaggagtctggaaaaggtagatttgcaggatacagagcatgagactggttctatagaccaacagggagttggccagcacacatgaggtgctgttttgtggagctgtcatttagaggtcctctgaatgcagaattcccatgacccttacttagtacttctcttttgcagcattgtcggtgtaacagtagtgctgagcacacagtcacttattatctactagcactgctatgagtgtcattcatatagtaacctcattaatcttacaagagccttgtgaagtaacaaaaactattatctcaatattccagatggggaaactgaagcacagtaacattttcttcaatatcacacagttagtagcaaaacctgaattcaaatccagactacctggcttcagcgtcgattctcctaaccactaccctccactgcctctcaagatttttttgtctccttcacctttctaactcactgagcacccagtagtgggcacgacgtagcaggtgctcattaaatacttgtttgaacaaaatgattttctaattttaatattatgttgtagttgcttagaatcttaaatttttatagtcacttgggtgtgttttccaaactgttctttttttttgtttttaatgtttcaaaaatcctacctcccagtctgactgttcatttttatactttttcaccttcatagctgaatgtttagtctggaaagcagcatccacagggtcaaatatccagggttatttcctggatatcttcattggacatctccaatgttacctagggaagtgatactgcaacaaaaaatacttctcattgataggaacagaaccagttatgattcttgaagccttaatattattgaggcaagcagtctttaaacagctactttctgttgtcagtctgctattgatggcttactagactttgaaagttttacatagatgatctctttttttcttttttgccttttaatagttgagacagggtctcactttgttgcccgggctggagtgcagtgacataatcatagctcactgcagcctctacctgtccagctcaagcaatcctcccacctcagcctcctgagtagctgggattacagaaatttgccacaaatccaggctaattttaaatttttttttgtagagatgaggtccccgtatgttgcccaggctggtcttgaactcctggccacaagcaatccttctagctcagcctcccaaaagtgctgagattatgggtatgagcccctgcgcccagcccataatctcttttaaatgcccagtacaaccctatgagcttcctgataaaattttccaattcacttactttgtatccttttttgttacccagttctttttccaactattaccatgtcaaatttcaagatgaagaaacaggttcatatacctcaaccagtaagtcgcagaaaggggatttgaactggtatctgtctaactacaaaacttacagaggtttcagtgaaactcaataccccataacatgaaatcatgctgtgatgagggaaatgcagcttttccttatgatgcctgagaactgatgatgcttttttatgtacacactgtacactgatttcataaaacactttaacctggaagatatgagtgactccctttacatttttttttttttttttttttttttttttggagacggagttttgctctgtctcccaggctggagcgcagtggtgcgatctcggtttaccacaatctccgcctcccggtttcaagctattctcctgcctcagcctcctgaatagctgggattacaggtgcgaaccactgcgcccagccaacttttgcattttatttatttattttttttagtagaggcagggtttcgcaatgttggccaggctggtcttgaactcctgagctcaggtgatctgccctccttggcctcacaaagtgctgggattacaggcatgagccatcacgaccagcctacattctgaaaaaatgacctcttgagaggctgggtgtggtggttaatgctgtaatcccagcactttgggaggctgaggtgggtgggttgcttgagcctagcagttttggactagccaggagaacatagtgagacattgtctctaaaaaaaattttttttaattagctggcatggtggtggcatgcatctgtggtcccagttgttcagggggctaaggcaggattgcttgagcccaggagttctagggtgcggtgagctatgatcatgggaccgcactctagtctgggctgcggagtaagacgttgtctctaaagaaagagaaaaaagacctcttcaggccacagagagcaaagtaaagcatctgaaatacatttacctttttttcctttagtgaggaaaaacattaacaaacattttaaatgtaactgggaaagaacatttaagaaattcatgcccctctcttgtattccagctttcttctagttgggttctgcatatgattgtgttattagggactatgcctttaaaaatgaaaaaataaaaataaaaaggccatggttagcctgtgagcacatttttttattctggctctggccacaagaaccaagtttgactaggctctgtatcaaaataaaatccagagaggcattcctaaacttggaccttttgtccacactcacttcctgttgaccgagtgacatcccttcagctggccctccatcaagctgtttgcacagaatagggagcagtgttttcaagggcagcaaatcttgcagcttattaaaagtagcatggtatgcaactcagatgccagttctctttcctttttgggtttccttgagtccaaaggtcaataggaacacagaaaagctcagtgtattggtttgtaattccactcccactatggctcaatagtacaatatattcagatccttgtctcattgagttcttcaatcttcaatctttgttccctaaacacaggcttgtgtgaacatgctattagctagcagggttcaatttcagtattaggggttacattcagtttcaagctcctcacagttgtctacactgggtatgaatctggaactgctgccaattttctttgagggcattttagtatcattatctcagtgcttatgctattatctctgaagtgttgttttccagcgattttctgcctctaaaaagacaggatggtttagccattttatcaatgaaatttaagcatgtagtgtcgctgactcttgtgatttccttcacttcttttgttctactacctacctgaggaaatactttaatatttccagtgagaaggcaccttaagggagtctctaaccgctcaaaatgtggtctatagagggacagcctgggcatcatctgggagcttgttgaaaatgctcaatcttaggctccagcccataagtgctgatgtagatctgaattttaataagatcccttcttgtttcacgagcaaggtaaagtttgagaagcaggggtcgggcgcggtggctcacgcctgtaatcccagcactttgggaggccgaggcaggtggatcacgaggtcaggagatcgagaacatcctggctaacacggtgaaaccccgtctctactaaaaaatacaaaaaattagccgggcgtggtggtgggtgcctgtagtcccagctactcaggaggctgaggcaggagaatggcgtgaacccgggaggcagagctttcagtgagccgagatcgcgccactgcactccagcctggacgacagagcgagactccatctcaaaaaaaaaaaaaaaaaaaaaaaaaaaaaaaaaaaaaaaaaaaaaaagtttgagaagcagtgatctggcccacatctggtcttctaagcaattctgagagggattttagagcctctttttaatactcccaataatagagatgccactggtgtaaaatttgctggacagctaaactctgcctacttataatttctacacttagtctttatttcatctctttagagcaaatggaataagtctaatatgacccatctaatatttaaagatagataacgtttcccaactcctcacctccaattcctccctctctttctctttctctctcatgtctctttcattgcctgttgcttactcttccctcacccctccctttatctcttttcatgctaagcatttattttcagccattctctgctttgcctggcttccaaacttttcaacgtgaccattcctattttattaatggactctagttaccaacttgtcagtttattatatgtgttgtaaaaaagtgcaggggctatttaaaattgtagaacagagatctactgtgctgattctgaaatatttaaaagcgttctcttggtgtctaccaggccatgatatctaggaggacccaacgagtgacaatagggtttcagacgtgattgttaggtagagtaaaaaaaaaaaaaaaaaaaaaaaaaaaaagatggaaagtagccacttaaatgagaactatgctaaatagtactaaagcttcagtactaaaatacagaattacaatttgaacttccattagctacattcactacctaatgccatgtaaacaagtaaagtcctaaagtagaatttaggccattcttttcagatctagtgcattgcactaagatgattaaattaagcttcagaatcaggaagcagttggccggaactcagatatttgtgtgaatctgggcctgaatttttgctgagcaactccataaccaggggctcagtatgtatgaggcatatcttaatttctatgtaaaagtctgctgtacacttttcatgttctgcataaatccatcatcctgaagtcctaggttatatcacttttcttaactgttggtttatatttggcaaaatgtcactcaaagaaatatcaattgataacaccactttaatttaatgtaggaatgcttcctgatttataattagacttttcacacagaaatagcagatacattggtgtgctgcacccattaacttgtcatttacattaggtatatctcataatgctatccctcccccctccccctaccccacaacaagccctggtgtgtgatgttccccttcctgtgtccaagtgttctcattgttcacatgcaacaaacctgcacattgtgcacatgtaccctagaacttaaagtataataaaaaaataaataaataaaaataaaaaataaaaagaaatagcagatataatctaaaaattcttagtgtattttttttaccctcaaatactcaagcactgcactggtgattgattgtaaagaagcataaacaaatcaggttaagtgatcaagaaatgctaaacttgttgaaacatccacaaatgcaagcaagattttttttttttttttttttttgagatatggtctctctctgtcacccaagctggagtgcaatggcatgatctaggctcactgtaacctccgcctcacaggtccaagcaattctccttcctcagcctctcaaatagctgggattacaggcgccagccaccacacccggctaatttttatatttttcgtagagatggggtttcaccatgttgaccaggctggtctcaaactcctgacctcaagtgatctgcctgccttggcctaccaaagtgctgggattacaggcttgagccactatgcctggcccacaaatgcaagcaagcttaacaaatacctttaagtgctatatgtagtactagatcttctaaaaatgtatactaaccacatcagcacacattattcaagtgtctttgatatgtcagatgttggtcacttagaatgctcctgaccttaggaatattatcaattacattttcatgatcattttatacttgtaatttctacagcattttatgcttactccagaatttgtttttaactttaggtatttttgtttagagatttaaaacctgacttttgatggagtaccatattgaaaaacatctgaaaaatttaaaaattgctttcttatattattttattttgagatggagttttactcctgttgcccaggctggagtgcaatggcgtgatctcggctcactgtaacttctgcctcccaggttcaagcgattctcctgcctcagcctcctgagtagctgggactatgggtgtgtgtcaccacacccagctaattttttttctttttttcttttttagtagagatggggtttcaccgtgttggccaggctggtctcgaactcctgacctaaggtgatccacccaccttggcctcccaaagtgctgggattacaggcataagccactgtgccaagcgaaaattgctttctagaaattgttttagtggcagaatagtcatttgctcttatgttgtcttcgagaaaaaataaaatctgtcattgatttgctgctcatattttagaattgaaaatgagtataaaaaatgtgagcttatgggagtgtatttattgatctattgtaactgttcagacaaggggataagcactttgtgatagaagacccaaaaacctaccatatttgagaggttttctcataaacaggatctaatcttccaaattgtgtctataacttctagaattatcatgaacgtagtttatggccatgggggcaaaaagggatggagagaggcaaaatttggagacagaaagaaggaaaaaaaacagatgagcacaatttgcatacacgttttataaattcataaaattttacttttttgaaaacgcatgattctgtgagaagaatttagtcttttttatactttatttaatctaaatctaaaaaagagctttctgttttaaagagagcagaaactcagatatacatagagtatatatatcccatagatattttgatttttttaaatataaaatacatttcaaatttttcatataggccattccactgggaaatagtaaaacaacatgagcactatagatgtgagtgttttggtgaggtctaaggatcaattccctaattgtgctttatctaagaatggataaagtttcattttctattctgtgaactggaagcaaaattcacaaatattacaatggtgaaattacgggattttttaagttaatggcatctatggcattgtttgtaaaattccagtagcccttcataactgcatatggataattattggaagaagaaaataaatatctgaaaaaaactgatatactacaggatagacagagaattgatttcacttcccaatactctaggtagggtggatggtatgctttattggatagtaagtaaatattttcttcattccaatatatttcattgtcctcttgagatttgcattccctctgctaggcatcccctgccgtacacactctgggaacttgttcttacacctcaaaagccttttttaccccaatactcatctaagctgacctatgtatagccggatccagagccttttccgttttaggctgtttgtctgagaaataaatgcaaaccctcttttataaaattcatatttgtgcaggaattaatcaacaccgattctgacaacagctgaaacagcacattgtaaacattccagaaaaatcaaataatataaaccaaatttagaattgtgaaatttccaccccagaaatttggatatgtggaagtaatagctaccaaagaaaatcacaatgataaaacttgatgtggactaaaaaaatacaatttgtaaaatgtgcatgaaaaataactgacccagaaaataatttccataaagtgaaatgaaaatgttttgatagcacgtatgtaaaattgataaagagatggacttggctaaatgcagttgattttggaatatactttatgaaagtgtttctgcctggcacggtggctcactcctgtaatcccagcactttgggaggctgaggcgattgaatcacaaggtcaggagttctagaccagcctggccaacatggtgaaacgccatctctactaaaaatacaaaaaaaaaaaaaaaaattagatgggcgtggtggcggctgcctgtaatcccagctactcggaaggctgaggcaggagaattgcctgaacccaggaggcagagcttgcagtgagctgagatcgcgccactacactccagcctgggtgacagtgcaagattccatctcaaaaaaaaaaaaaaagtgtttcaatgcttacataatctgatctaaaaggttttgtatccataaacatgtagttaaaatgtcccaaaaatggtgggatcagaataccctttcctctcaagagcttaatgggttattcctcccagggatacttatgtctttgcagagctcagatttgttaaatgtgagagtttaacaaagtgaaaagttaacagtgaaaattcaacagtgccatccccgaggacagtttcatccagtgaggaatggaaacttcgtattttgttaccaggagaatggtggtcaattcccttgctactcaaacgtctacaaaacaggagcatcagcatcacctgggggcttgccagacaggcagactttgtatcaaaccaagtgtactgaatcagaatctgcattttaacaagatctctagatgattcttatgtacaataaaatttgagaaggaccgttgtagtcaaatgctgtgtaagtcaggcttcaaccatgagacttacatggattgttttcatttctgtttatttcaactaatgactccatggtgatgccacccacatttatgcttgttatgagatacgtcttttattcttcatttgctcaattttttcacttcatttatgaggaaacacaaatgatatgatttgaaaagaaaaccttgtcatctctttcagagcggaattttgtagctagaatatttatagaatacgagacactgatgttccatgtgtccttgtttgcggcgtctgatgtttttgttgttaataaccgcccttcccttggtgtttgagcatctcaagtgttcttgctgaggcagcaaggaaaatgcagttctgtgcatctgcaggatgttttcctggtaatgactatgatgctaagcctctatccctctcagtatttatcaaatttggacataaacttcaggaacaaaaatagaacttggaccatgagagttaagccacatttggttaacccatttggggatcagtgtaaactgtcttttgtcacgtagcaattccctagtattttccctctttttccattacttgtacattcatctaggagcctgactgactattttggtctccagtccatttacagtgttccttggaataacagaaacggagccgttctaagtcttaggaggcttgagttagcatagtgcctgataacattgcagccattcaatacatgtcacttgtttcctctctttttttcttaatattaataactagatagtcactttgatgtactgtttaggtcttctatctttcacttatctgcacaatgaaaattagacagaaagatcattcctgatctatgtatatatgatctttcagtcttattttaatttcgcatatatatgtatatatatatatatgtatatatatatatatatatttccatagacctgttatgcatattattcatggtgctttttaagttggtacgtcctaagacaagagtcccttggactaccagttttcaacatacatttcttaggtaccattctgctttgggggaaactgagtgaacagggatcagtttcctccttgccaacactgtgcccactgtacatattatggttctttataaaattttgattggaaaaagtttccaagctcttacaaataagtgtgcaagaccagcctgcaaaacatagtaagactctgtctctacaaaaaaataaaatttaaaaaattagccaggcatggtggtgtgtgcctgtatcgtcgctactcaggaggatgaggcagggaattgcttgagcttaggagttccaggttacaatgagctatgattgtgccactgccctctagtgcggacaacgtagccagatccagtctctaaaaatagcaacaagaataattgtgagacctgattctttaagaagttaaaaaatcattagtgcaaagcaactcaaaaacactgtaatgggaagtaatgtaacacatttatgtgtgtggccttttcacttctgtgaagtgaaaaaaaatcagaaaagcatggctcctaaaatgtcttttgaatgaattaagccactggatacctatataagtagtattacttcgatttttgaatttctacatagatctttttttttaggtactgccttaaaagtttctgattacttttctctcacatgcctttatcctattttgaatttttaaagtgctatgttttatgccagtcaattatgaagttatcataaaccaaacacatttagcctaaatggtcgatagaaatttcttctttccaggttcattttaatgcagttatttttaactactattacctattaaatgccccttctgggctaggtacagtggctcatgcctgtaatcccagcactttgggaggctgaggcaggaggatcatttgtccccaggagtttgagaccagtgtgggcaacataaacaagaactcatctctgtgaaaaataaaaaaaaaattagtgaagtgtagtggcatatgcccttagtctcagctacttgggaggctgatgtgggaggatggtttgagcccaggagtttgaggctgcagtgagctgtgatcatgctattgcactccagcctgggtgacacagtgaggccctatctcaaaataaaaatagggcccggcatggtggctcacacctgtaaatcccagtgctttgggaggtttcagcaggtggatcacgaggttaggagttcaagaccagcctggccaacatggtgaaaccccatctctactaaaaatataaaaacttagtggggcatgatggcacatgcctgtagtcccaggtactctggaggccaaggcaggggaatcacttgaactcgggaggtggaggttgcagtgagccaagactgcaccactgcactccagcctgggcaacagagcgaggctccgtctctaaataaataaataaataaagccccctttggagtttatacttcactcatttcttactataaagtttaagaaaatctatttctaacctatttgttctgctgaacattaaatgccctgtgattaaaagccaagtaagtattcaccaagtgtttcttgatcaacattatgggccactccttaagtgactcctaaatccgctgcatgttcatgtccattttgttcatggaaatgtaaacacaagagtaattaaacactgtgactcaaattaagaaaggtgaccaggctgatgtctgtccttgtaacttcatgagtaaagtttcctatttatcttaggctccaacttcacataataatagcacctgccacctgtagatgcagcaatgtttctgaaggatatagtcttctttcttctcagcagtgtggggacaaaggtcacgttgcagcaacatcctgagctaagcctttactaccaactggattctactttgaaactcaatcagttatccttaaacaagaaatctgagtttctgcggaaggaaagagagtaatagccagatacgtcatgcctccaaaattggtaactgaagtggctttccctcacatttatcttggttgggtgaaacaaggtcataggtttacctcattattttaagagttatctcattttgtaattattatttaaattcatactctgtaatagggaagaaaacaataaaaatgttgtctttcttacaggcatatcacaggtgggagataatttacatctgttaaatatgataattttttcctaaaggttctttacaccttgagttagcattaagatatttaagatggcctattttagatttatagattttgttggaattagtttaaccttttggatcatgaagatatttagcagtggggatttagaataatttatatcaaatcttctagatggtgacaaattaattatactttaaataagccctgatcattcatcagccttcaagttcagttctatagctttcagcagcatagctgacatattatccactcgtgtcatatgtcatcatgcaaacttcgtgaattataactgtaacattaattggatgaaagttttcttgatgggaaagattattgattaaatggagtaatttgaagaaaataaagcccaacacaaattgagaaaagaaaaaaaaaacacagtcaacaataggatatatggtagcaactggttttatggacactgctaaactaaataccaaaggtgtattttattcctgtgaataaaactgagtgcaaataatggaggaatttagcagaaaacttacaaggtcatttacctaagggttctttatgatggaattccgttgtcagaaaaaggggttcatgagtttttaccaattttccttaggggtttttagagcaagtttgaatggaagcaataaaacgtatcatcttatatagcaaaaatatttgtgtgctagagatggtaatgactacattacaataaagattttgaaaatgtcactttgtgtttgttttcatcttgataatttgtgtgagattgtaaatgcatcattctgtaatctcattggctggattgtaaaatcatttcccattaaaagtttttcattatatgttaaactgtaatgaaactgttcaaattctttgactatggctaaaaaggagctaattgccatcaccagtaaattcattctgccttttgggtataaaattctcctgattaactttttctaccctctcaagatttctggagattcaggataatggagttttcttggatctggagtttgacaaaacctagtctacatcccagttccttcaacattctctagaagcactagttgtaaagaatttgtaagacctataaaacagatgtctatcaaatcaggcatttaagtatgagttcaatgattgagatcattgctctttttttttttttttttttttttttttttttgctggtaaatagcagttaaattgcaactgatcaagaggtattcaggatggtgagtttggactgcatggctcccttcatggactcatttataatttaaacaagtgttttattagagttatttcccatttactagttaagtgatttatttatggtctattcagagtctattaattacatacatttcagaataagtagcaaatagtcattgtaatagtttccatagtgtactaatcttactcctctttaaatttcgtctgaagttttgaatcttcacagaattagctagacatatatgttacccactacaaatgacgtctgaatctcttaacaaggatgaataaaaagacctgaaaagttagcatggtgggtactctcaaactattttgttttttatttgcatagctttcctaagtaaaaaatgtctgggaaaggcaatgccaagaatctcttggtagacaggcatgctccacacatatacagtaggagccaaacagtcatttatggtaatttcattaaatggaagcttgatatgcaagggaaaaatttttgtatgtgcatgtgactatttttcaataaccaagtaacactagtattaataacatgctaaatcagcatgtattaattttttttcagactggccaaaaaaaatttacttccaagattactgaatgaatattaagattgcttatcttgaccttccttatcactgcgtcatgtgctgcatcagttttgttattgttctttgttctgttctgatgtttactgacttggaacatatgctattataactacaccacaatctctcttctatttctctaccataaccttgcaaggggttaggcaaacttggagacgtgtcagaagaagagcttaccaacctcatatgttagccgtattgcacagcagtactgcagaaatgagctgcaaattccaagcaacatattgagtttgtgatttatttgttttccaggcaggccaattaattgttttgctgtgatgctgccctaaattgtaaatagaaagagcaagaaaatgaattgtcacattctgtgcctgtgtctcttgctacttaggatgacaaaagcagtttctgctccgactgcaagtgatattgtaaaatatgagaattaggctggacctaaatgtgttggtcagtgtgtttcagaggtgcgttttagaatggctttaaagacattgtactaagactttactaccagtaggttctggagagaatgttataagacaggaaaaaggaaaataattcttatttcatgcctatcatgtgtgctttctttcttgaaatgatggaaaatgatggcttccccatatttccaaactgattttttcaaatagatttggaatgtttattatattaataaaaataagtgtttttagatttttactaaaggggaatgaaagagaaggtaaaaaaggtaaaactgacacatgagggaaagtagtttgtcagctgaatggactattggcacattttcattagttccagtggaatttgaaatggtttgtcaggactctaactttggccctaaaggcacttggtgaaatactgttttattttacttggtaaataataagtattttaatggaagaacattttggctttcacatctgctccctcgtggcaacagcaatttgaagtcagtacatgctactgaatgccatgaactcttaagaaattaccaaaataccttaaactaaatttcttaggtgaaagttgtttcaaagaacgattgagccattgtcacaggaaccaatgcaggaggctttataaaaacacatttttggtcgggcgcggtggctcacgcctgtaatcccagcactttggcaggccgaggggggtggatcacaaggtcaggagaccgagaccatcctggctaacatggtgaaaccccgtctctactaaaaatacaaaaattagccgggcgtggcggcctgagcctttagtcccagctgctggggaggttgaggcaggagaatggcgtgaacccgggaggcggagcttgcagtgagctgtgaccgcgctactgcactccagcctgtgggaaagagcgagactccacctcaaaaaaaaaaaaaaaaagaaagaaagaaaaaaaatttgccccgataccatgactttgaatcttttccatttcatcttcacattgtgagtcatgatgaactactaatacaatatactggcaatatttaaagccttgtatttgctttttgcatatatatttaagttttgcaaaattttggaaacagggagcaaataattttatatcttggaaagtaacctgggcctgtcatattaacccactgcttatgaatggccctagggtaacatgtcattcacattcttgggcagcttgtcacatgtcacagaaagcactatagacttacattggatttgactcaagaaacatgaataaagataaatgtggataggtagaagataatcaaatactggaacatttatggtgctatcaagcacataaacacatttataaactgttttggcctctgtacaatttatgcgccctggattttcccacagaagttctgaagtaacttacaaaaaatatactttacaatgaatatgaaaaactcgaactagaaatagtaaaccaagagcactaacaggaagaggaaagagatatatacgattattgagtgcgaagtttcctggcaacccaaacaaaaaggatacaaataaggaacatcgttatccttattataactgaggaagtcccttagcagatgccaaagtttttcctggcagaaatgtctaaaagatgttcttaatttgtttaagcaagagttgcttagaagcaagtgagtttgaatttgtctggtgcttaaaaacagtgttatgggtagatttatgtttccaaattataagctttggattttctcagtattacttttataaatgccatcatattacaaagagaggataataagcatccagtgggtcactttggtagacttagtccttgtggttaatgaaggcacatgttgtcctgcaggcagtatcgtgtcaagccaacctggattcatactgagctgtgtgtcctttgtcaagttctatgacttctgtgacattccgtgatttttttatttctgtaaaataagaatgctcaattacatagttattaagattacatgataaaatatatgtaaaagagctaaggttatcacagtactgtcttaaccattaacagctaaagatgaaataaccccatttttttgcttattttcccttcttgtcactaatttcaacttatataatggaggaataacatatacaaagaatgaatataatcacagaaattataactgaagtctgggcttctgactcagttccattctgcatacactattacagctgtttgggtcttacaggaaatgagttattatggagatataggcttccaaagctaagcatctacccttttggaaacaaaatacattgtcgatgcaaaaaaataaaggtaactatttatgatgaaattcagtttcaaattggattgcagccttccttgtttttaaaggtgaatggaccaagcaaaaataaactcctttgtagcaatttagaatcatcaggttttattctgctttaatatagagcaaactctgagtactttatggtccttgaaaagttggtcctacacaagtagcctcagcgtcttgtgcatttggttatttggaggtcagtctgttccatttaccagcccttgaagcccttttacctccctccagcttattacatctaatcttctttggactcaagatcagataactaagctaactttaactgtgaataaaagaagaatcaacagaatctggtcatccaggtatcaagtacccgagtttttaatacatgaactctgagacttctctcttagttctttggagctccttttgacttttaattgctagttttcactgtgctccaaaaggtgaaatgttattctatttttccccaggagttattaaagactgacaagacatcaggagtaccccacatgcacaaagttcaacattatcaaaatttttgaatactcaaatattcagttatattcactaataattatagctctcttactaaagtttactttggattattcacagaaggtatcagtttatttcttgaagaatttgagagaaggaaatcatctttttcttggtaggtttgctcaaaggtttagcaatacttatcattcaaacactctttcttatgtctcacctaggtgcctcttggtaatattctgttgcttttttactgggtttcattcacggtaaaaatgaaagatattttaaaacaacccctaaagcattttaaattaactatttaatgtctaagttttatgtttcattttaactaccatgcacttaagtatttccttgtccataggccatacttcctagtacacataaaggggatatttttatatctcatctgttcttcaaatcaaaacagtaataagtgcttcccaaatggcaaacaaattctaaggatgtaataaactgtatacttccctgatatattatgacaacagaattttttatttttaaaatttgtttatatttctttattgcaacctttgttgaaatttccattaggcagttaatttacctcttttcatttgactctactctataaggctctgtattctatacaacatttgttaattaagaagcagtggttccacctaatatttctgatgtgtttgtaacatcctggatagtatctagaattcttctagttctctgctagctaacatatattgtttttctgatctgtgctgagctctggaatcaaggctttacatacatgatgttactatattgatatagtaactctcgaacacagattaaattataatcctcctcgtacagatgaagtaactgggtcctgagaggttaggtaacttgtatcacttagcttagtagatgtgtgagctaagattgcacccaggctgtgtggactttcccctttatgccaatactctgagtggtgctactgacacaggcctatgggtttcggttgatgtctgggagcagaaaactgctagctatacccataatatttctttcagaaagagcagtggtgatgcagctttgggctcatcgcaatttaacatagggatggatttcttcacaatttttgagttttttcgggaagtgtttccctactcccctaaattgccttattactctcatgcaaatacccgcagctaatcttgtatttgcccctgattttagggtaatgaactgagacacagaaaactacatagcccattgtgtgcctcacacggatgtgaagtggcctaaccgaatttacccttggtgtcacctgtaactgtttaagtgggtaggcctaaattttatactattaagcactaaatgaatataaaatatgactttaaatgccatctacatgtgaaaaactcccaaaaatgtattcggagctcagacttctccccagaaatgcagccacacatgcccaactgtccagttagcaattccacttaggtgaccaataggcctaacaagccaaaacccatctcacagtttttcttcccaaaccggctcttcttggaagctttcctaacttagtaaaagtcaactctgctcttccagttgcttaggcctaatgtctcaagttagcctcaaatttctttcattctttttttcattgatgcccttcccaccacagtatagcaaacaacaaagcccactggtcttaatttcaaaatacaagctgaatctcacctcatttcagcaccttcactgccacaacctcgtgtaagcgcaggtgtctgtcacctgggaccttgcagatgcctcctaaattggtgtctggcttcatcccttgcccctcttctttttcttctcaactgacaacctaaggggtcatgtcaaaatgtcattcctgtcctcaaaacaactccagtggcttcctgtctcacatagagtaatgcaaggcttatgccatggctggcaaggtcttacatcttctgtcccccacctcctctgccccttgacctcatcactttgcccccacctcacctgctctattcactgccgcagccctcagccctactgtctcctctgcttcaatgcccctccttggtgtacatgcttgctccttccctcttctaggtggttcctcaaaggggttttcctcacagtgagtcctcctcatcccaccccagctaaaggatcaaatcttgttccatttctcactatctttttccccttgaaaattatcacaaatatatgtttagcatatccccattatcagttgtctgggttcccactgtcatgtaagttctatgaaggtaaagacttctttctgcaacagaccctgtatgtccaggatgtagaacattctggaaagtggtgggttctcaaatatttgttgagagaacagtgaacaattactgggtgagattaataattcatcagaaaataataactatccccctttttgcttaaaataaatgtagaaagtgatgtcttttcatttttaatactttgcccattttttgtcccttatcctaacaagcaggtggtattattcttcacccaaaatcaagaattatcatctccaatttttttttgtttgtttgagaaagagtctcacccagtcgcctaggctggagtacaatggtgcaatctcggctcactgcaacctgcgcctcccgggatcaagcgattctcccgcctcagcctcctgagtagctgggattacaagcacttgccgtcacacctggctacttttttgtatttttgtagggacggggtttcaccatgttggccaggctggtcttgaactcctgacctcaggtgatctgcctgccttggccttccaaagtgctgggattgcaggtgtgagccaccacgcccagcccatccccaatttttaaatggaaagggatgtgacagttttctccctattaaatactcagttccctctaataagtcttgaactatttctaggttgactgacagttgtaaagtttaaataattcttcctttcttttattttaacatcacctaggggcatttatgtcaaagactagcctcttgctttttgtaaaaagatcagagaatctcttaagtaacctgtaaaatactgttcaccatccttggcaaaggtaaaatttaatagttcataagagttttcagaagcaatgcaaatatttttaaatgatttaagtttaagagaaatgataaaacatgggttatagtcactgtgggaaagaatccactgcatagcgtcccctctttgaatgagagagactttctagaaaatgggcagaggacagagaccaccacatatggggaaggaagcagagtgaaagccatgtttctctttgacctccaagagacatttccatcaagtttaggattagaggtgagtattaatatccaaagataaacctaagttctgttacacaaaccaggcaaagatttatattttctgaatgcaatttgagataaaactagaacaaataatatgaagcaagaaaaaaaaaaggccaataaaaccacaattctccatagtctttgaacagtttggattgtcttttagaaaaaaatgttctgaaaaaaatcaaatataatttgacaattcatatttacaaaataaataaaaggatcaaaaacacttagatggctgggcaaggtggctaacgcctgtaatcccagcactttgggaggctgaagctggtggattgcttgagctcaggagttccagaccagcctgggcaacatagtgagacccccatcactactaaaaatacaaaaagtagccaggtttggtggcgcaagtctgtaatcgcagctactcaggtggctgaggcaggagaattgcttgaacccaggaggtggtggttgcagtgaactgagattgtaccactgcactccagcctgggtgacagagagagactctgtctcaaaaaataaaaaataaaaaagtaaatcacttagttgattctctgctttgtcacagaaaatgtcaccgtgcattgcttaaggtgtgttctgtaacctgatcctgaaggaactataaggtacatcgtttttttcaggctcttgtctatcttctagaatagttgtaatattctttaaaatagaaaatataattattgggataattaggatataattatttgggtaataaaagtattagaaggagattggtatcaaataactgttcatcatcctattgatatttaatagtttatttttataatcattatggaaatagtgaatactttttaaagtaatgtaattatttataataataagagaattgtcaagttgtcattgcttccctaacacagtatacaaaggaagaagaaaacgctgatccaattctatcttacattgtgactttagtattccaactagattgtaaaagacaaaaggttaaagattatctactaattcagtttcacttttgctagagtttaatatcacacatgtaatgaataaagtaatagaaaggaaggacattaggggaagtctgggggaaaataatatcttagaaattacttattaattcatgttcaattaaatttgtttttcactgatgataaaatcaagttgccttcttgagaagtcttacaaatttgtttttttttaggagatgtcaacccaaaaggtcacctattttttatattaaaaactaactttggaaattttcagaaataaaagaaaagatcactaagctgagaatccaaacacttgactttattgtgaaagtaattgttaaatgttacctgtctcagtggtattctctggatttcagtgatctgcctgtagaacaaaaaggtgaggctaagtcttcatgactttatataagatttccagtaccctctaattgctaggagtcccactcgagaatatccttagataagaaaaaagaagggagtgaaatgtaaatgtgtgtgtgtgtgtgtatagttgatgatagccttttatgacaaaagaatggtctgtattagtgttcagcaaacattttctgtatatttaagaatggtgtggctgtattccaataaaattttgtttacaaaacagataacagatgggatttggcccatggctatattttgccaactcctaactatatatgctaataaaggtgttagctggtttagccctttggataggcaatattgaggccaaatcagattttatgtaagttcctagcctttgacacagcaatctcacttctagtaacttatcctaagggaatatttggacaaatacataaagatattatctgtaaggacatttattataacattatttatgacagcaacacaatgaaaagaaactaaaagcctttcaataagaaataaattatgtatattatggtttattcctacagtaagatactacatattcagtaaatgatgtcacatatttatatgtactgatgtagtataatgtccataatgcatccttaattggaaagaaataagctataaaacattaagtataatactattctggatttgatgataatctccagattatacgattagaaataatttcattttcttaaaactctatgatgtttttgtgtatactatattgcttttataactagaataaaaaaacagcaaaggtatttcaatttgggaaaaaatgtgtaacagtaagcagattattaaattatgatgaagcagatactttcaataaaatcctaaaaatctcatagccctctaaataatcttacatgttgttaatttagtttttaccatgggaattcacacccttagactatcaaagaaacaggcatttcagcgctatgttgaagacaaccatcatgacacaaattattcaaaaaagaaatagtgtgttgtatttaacattacaatttaggctcctctcagtttgtcttaagagaaaataaaagatgcttcttgccttcttgtcttttttttgttttgttttgttttttgccattgtagctactgccaattgagacattctgtagtttttctcagattcagagaagaaaatatctcacaagtttgttcatccaacattgtaatatgagttcttcagattcctagagaaagctcaaaggctgtccaaatccccacagctatggccatctctagtcttttgattttaactatacaaggaaattcttattatgaaatctttttatgaattatttttaaacattttttaacatttgtaatgttagtttttccaaggaaaactttgttgttagcagcaaatttttccagaataaaacgctgacaaaaaaatcagtaactttttaaaaaggctttatttagtgctttatatgttgctggcactgtttgatgagacgggtttgtgtgtgtgtgtgtgtgtgtgtgtgtgtgtgtgtgtgtgtgtgtttcacatgaaatatgcacatacacatttattttttatttaatttagctactttagctcatttaatcttcatgacaaccctacaaggtgcatttgcttatcataaattatcattcattttatggaacagaatgaggcatagagaggtaaagtatattgcaaaaacgtacacagctagtaggtggcagagcaggattcaagcgcctgtaggttgtggtataaacattttcctcaactgcctcacaacacttgctatgtagcctccacaactgtatgactctaactgatgggatacgtacacatgaaaaatggttaagaggccatatacagcaaaaaagtttgtgctgtacgactgcttatatgcacctaaaacaaacaaacaaaaacactggtgtgcttaccttaaaataaacttgagactttattacagttctggaagaaaaaattgtttttcacagacctgagctaaatttttgacaatgtataaacatacatgagggctagtagcacagtggggatgccttgcaagtgtaagttttgctagtctatgattgcattgggctgggatacagaaattgctacttaggaacactcaagagatgtttggtttttgagtagactcatttcaccttggaattcaaggtgttttaagagactttggcacctcttcctacctgaatcagacatagttgatgacagcaagtctataacacctgtagacatggaatctatctagaaatcttacaaaatgtcttccggtaacaacaaattatgctttatttagacatttagacctcaatattttattaagttttatcttttatattattactgtattttttagagacagggtcccactggtcacccaggctggagtgcaatagcacaatcatagctcactataacccagaactcctgggcacaaaggatcctcccatctcagcctttcaagtagctgggactacaggcacatcaccatacctggctaatttttgtagagacagggtctggcaacattgtccaggctggttttgaactcttgaccacaagtaatcctcctgcctcagcttcccaaagcactggaattatataccccctttaaattttgcagagaatttgcccttcttcatcctaaatgacattcagaaagtcatcaaattactgtgggtgacaattataattatcattcattatcactcattatcactattcaccaatacattgtaggtagtaacttgcttctcactttcagaaagatcctgagcagctgatctatcattactcttctatcaatcagttccattaagcaattggaaaataaaaaaatcctccccccgccccaccattattataagctccattaggaaagacaagaggaaagaaaatggaagtatccaatccttaatagtattatttatatttaattttttcatattgctgagggatattttctgattcaggggattcactggccataattacatgcacaaatagctaaacagactccaaatgaaaatttttaaaaatatatattttttaaggaacgacttttcatttcttagtccaagtcttcagagaatagtctgtacagatctgctaggagcagagtcaggtcatactaaattcagttgattgataagcttgtttgtggattgattttttttttttttttttttttttgacagagtctcattctgttttccaggctggagtgcagtggcacaatctcagttcacacaacctccgtcttctcatgtctcagcctcctgagtaacttggattacaggcatgcaccaccacccctggctaattattatattattagtagagacggggttttctatgttggccaaggctggtctcgcacttctgacctcaagtgatctgcccgcctcagcctcccaaactgcaatgaggattacaggtgtgagccacagcactaagacagattgaaatttttcttaggaaagaaatccatccataaaaagttaatgaaggtgaccaggcaccgtggcctgtagtcccagagcttgggaggccaaagcaggaagattgtttgagggcaggagtttgagaccagcatggacaaaacagtgagacgcttgactctacaaaatagcaataaaaaaaattagctgggcctggtggcatgcctgttggtctagctactcaggaggctcaggtgggaagatctcttgagcccaggatttcaaagttacgatgatctatgatcgtgccgttgtactctagcctgggtgacagagtgagactctgtctcttaaaaacaaacaaacaaacaaaaaacaaaacgacgttaatgaaggatgtaagtaggaatgcttataaagtttattaaaataaatatatatgatatatgattaaacataaaatactttttaaaggaaaaaaccaaaatgacaaataagaacaataacaacagtactttataagaaaaaggaaaactgtatcgaacctgaaaaccaagcaggcttctataaacttattgttgaatatcacatgctggcttccaaaaacgtcatctagtattaaagcttcaagtcaccagtgcatgtaacctctctccagtcctcaacatccaactcttcattctgcaaccacttcccagaaaagaagtcttctcagtttaccaagcaaactcttaacccaatatttctaccaccaagaatatagaaaaaacaatatgccaagcttaagaaagagaattttggccaataattgttattttcacagtaaacctaattctcaaatgtaaaaatggtaaaacagaatgcaaattattttaaatttgagcaagtcttttcttttgaataaaaaatcaccaaacaaataatcaagaaaacaaagatatgtacacaagcccaaattctccttttccctcctacttctgtttttttttttttttttttttttccatccctctccattccaccctcacatctatacttatatcttccttatggcttacttgaattttcttgctttccttttatatttttctccttcttttcccccagttctttctattgccaatatttgtgccttctttgtgtctctcagtgacatctggaattgtactggtggcagatgcaaaatttagggatgaataatatatctgtgctgtgtttacagaagaaggtgagctaggacaagactgcttttggtcctctagtcctggtcattttgggctcagaggaaaatcaaagaaaacaaatacaattggattgattttttttttttttttttctgagacggaatctcactctgtggcccaggctggagtgcagtggcatgatctcagctcactccaacctctgcctcctgggttcaagcaactctcctgtctcagcctcccgaatagttgagactataggcgcccaccaccatgtccagctaatttttgtctttttagtagagatggggtttcactttattggtcaggctggtctcgaacacctgacctcaggtgattcgctcgcttcagcctcccaaagtgctgggattacaggcatgagccaccgtggattgatttttaaaaacattaaccagaaaaaatattttaagctagcaggaatatatggaatgcttaacaaggctggcagctatgctagtgcacagagaaaaaaaaaatctaatatatggttcttggacttaaggcagtaaaatatttttttctagctttacgtgacccaacaacaaagttccctggcagatggtcatattatatactactctcttgtcctattgcttattctgtgcttgtccttgctcttatatatatataggcattaaaaaaaatgaaacaaaaacaaccaaacataaaattaatcagctctggtggtgtcagttctcatttccaaacattcactgcttctcccttgctccaaagtaaaatggaaacatctaacttgccagttgaagctctcaaatatctgatctcattcttcctttccaacattaagctccattggttctgttttagttaggacagcgtaggctttgcagcagtaacatttcagtttttttctgtgaattcaaggaacatttatttctcaccaacacaaagttgtatcagcagatactcccttccatctggtaagtcacaccgtgaagttcttaccactttgtaatgttacatttcatagggctgccagatttataaaatataggatgctcaattaaatttgaatttcaagtagacacaatgtttttagtataagtatgtcccatgcaatatttggaacatatttatataaaaagtattcattgctcatctaaagttcaatgttttagaaaaatgatttagtgtaataatagtataaaaagttttcagtattcaaatagtataatagtaaaataattcagcgtatagtgtataatatttataatgtaacataagactattatatagtttataatacagtgtaatatatagtatacagtattatagtgtaatagtgtaataattttgtataataatttttggtataaatctgtttcatgcaatatttgggacatgcttacacaaaatttttttggtgtttatctgaaatttaagtttaaatgggagcactgtgttttatctgtgaaccctgcatattttggcaagtgtatttcaaggttacagaagccaagagaataaagaaatggagcatcactgacactttatctgccttgacccggaagcagcacacatcacttctgctcacagtcctttggacagaactggtcacatggcctaagtataactgcaatgaagactgggaatgtagggcagatcatggagaagtggtgtccactaaagtctctgctacattctctctatgacatttatacatcaagagagtgattacttggcagtagagaggtctgggagttctatggacatttaaagaaagaaacaatgtctttcacgtgagatgctatcgtggagatgaaatttaagccttgatgggcaggtaggaagaagtaaaatagtgtaaaccttgtcatggaggtaagaaaggcagaacatagaaatgaagtgaacatttttctgatcacattttgattgacatatagatcttttgagatttgtccatcatctctactctcatcctattaaaaagaggatttaattttagattgacagatgatgtccttgaagatgatcaggaaacatgggagagagcattgcagattacagataaatttgtcaagagagttataatacataacaaaataagatagtaagccccaaattagatgtattcgcttatgctttcatccataaaaaccagggaagatcttgtcagatgaacaaatctgaagttcttggaagttttgggtaaatgctttaaaaattagaaaaataaaatagggataaagaaaataatcagtctcgattgtatgtaaggtcttacttgcatattcgtcataaattcagcaatttgtaagtggcaagttttcattacaggacatatgtcttgttcttattgaaatgtgagaggaataatatggaagatgctaggaaaaaacatattttactttgtgaaaaatttaaaaagtaatctgacaattcaagtgtgacgaggtatccaaatctatctttttgtttctggaaacattcagtgtaccaacataaagtaaaaggaattatcatcacagacaccttataagatgtacatgtcactttatcctgtgaacacaggccctttgctcctggaaaagaaagatagaaaggtttgccttcccattccctgctgcacacgcagtacctgctgaacctaatgttagtttgtcttagtaagatatatttgcagtcttcacaaataaaaattgttctaactcacaaatgcttaaaaaaaaagaaacactgcatgacaaatttacttcaagattaaatgcaaatttgaatcaggagtatatttcagggattaattgatggagttctgaaaatcaagtttaaaaataaaaatcttgatacaacaaaccatggcttttggaggtgaaaggaatgtttactcttgctgaagttcgttggcaaatctcctcagaacatcatgaagaaaacatatttcaggactcaggactatgttatcttgatgtttcacattcctgcctctttgggaagttgtagttattattccagagtctcgggagatttgctgtaagatctaaactgccacactctccctttttgaactagacatccatagtcagggtatgtattttaagaatgcatatctttaatgaaaacagtctttgtactctagaatcttccccgcagcctgactctgaaaatggcctggtcttcttttcatttgatttttacaatccaagaagtgttcagaggaagcgttatatttctctttaaaacacactgagcataaatttaattggtaataaaatgcatcaaccgtcttctctaagcaaaaagtgaatagcagtagtgttattccgatggtttctcattgagcttttccttcttcacaacttttattggatattgactgaagaaaagaaaattaaaaaaaatataatcacaatgctcaacacctcagaactgaagggttttgttaatccctaagacattataacaccaaatggaaatggtgaacacaaaatatatgtgttctctttgcttgttcaacttcttagggcattacactctggagttagtaaaatgtatctctaggtagtatctgggtagtaaatggtatctctaaatactatctagagatagtaaatggtagaagttcaatgaagctatatgaccctgagttagttcaaaaccttgttctgccactagctatataaccctgggtaggttaacttactactctaatctcagtttgcaacctgcgaataggcctgatagtgaatagtatcagcctcataggcagttttgagcattaagtacgttcatatctgtgaattgcttggctctttctgtgtcttgcccataagttcttagaaaacatgaaagcatattgcttttattcccaagttactaatgtgtatgttagaaacatttttcctatatatgattattttcaactttttaggttttaggcagatttagttataaatactgttttaaggtcaagtttcctgggaaacaggctacgaggcagagatttgcagttgaagtttattatggagtgtaatttggatcaacagtagtagcagagagtgaaagaatcaggaaccagcagaaggagagcctgagctgtcacaatatctcacaatcccttgatctgatgggttggaatggctcttaaggttgtcccagtttagacagaggggatcaggtctttttacacccctcacattgatgagtccttgaatgcaagatgcagctctggatgggaaggggaataatcttgggccaggtggctcttttgggctgagggtgctgcccagatggtgactcatctggcagctgacattcaccaaaacgatcaagagctggaagagtgagtgtccagtcccaaacagggcacctagtgatgcaccagtgtaccatcacatgtgcatatataatattatttgcattcattatgaatgtctcgatttgttttgtaatagatctcccaggctcagattgagaaaaacataaaacaatttttattacaataccaaaattaactggctaattaaaaaaaaaaaaaaagcattttcctaggcatttgcctccttatctcctgaaaggtacactgtgtgaattttaatgttttagcttgtcatcttttaagtgtggatacaatctctgaatttgtgagttaatgtttgaacattttataattactgtaaccttcttccaaatctagcttcctatgagccttttgttttcatttttcatggcatagatagcattataagaaaaataaggggacttttaaatgaaacttcattattccatattaagatatcaactgtatttattttttctaattaccacgttctccttcctagtatgctaatgtaccttatataggcatatttatagtaagtagtttatattagtttttatttaacttaacattacatcctaaatattttcatgtgactaatttttacaatagtaattttaatagaagcacaagagtccaatgaattgatgtgctatctattgcttaactattctcttagcctttggctttcagcctattaccaggttttgcctacaaaatcatactataagttatacattttctaactcagcaattcagttagattcactaagcagtaacagtcaatgctggctcatgctattaaaaggaggcagacataacaaacataaaacttaatctttccctcagaagtacttatgaatgaaaatgagagacttatttactataaatggaagtaaataagtatccacaaaattaaacatgaccagtgatatgctggaccagagataggagcaattatttctaattgtgcaggaagaaaagacttcatagaggaggaagattttaagctaggcttttcaggatgtgtaaaatttagacaaggaaaaaggatgatcagggcattttgagctaaaataaaagtaacagcaagataaaaggatataaaagcaatttacagatataagaaactatgagtcatctggtacgggtggcttatatgagatgaagaggtgacaggaaagaataatttagagtcatatattccaggaacttgacctccatactataaagagtttcaattcctctgtaagcaaaaatataattttttgaaccgaatagggccatgattagattagtgcttcagtagaaagatggttgcattgatatgaagcaaggtagaagacttatatccctgttagaaagatattgcccaagttcaaggaaagtttattaacttattcttttattttttgttctttccttcattcataattcatgagtatataatcaccttagcagggtgttagaccttggggctgttaagataaaaatcaatatctatttaaaattatacatttgttcaacaaatataaattgagagcctactttgtgctagatgaatgaatcagagcagaatttacttcagtcattgaccttaagttctgagtctgaatagtgcatagcatttggtgattacagaccaatgtgttagagatatgaatagaacactaaagtccttcactatgtgacatttcgcagaagagattatacagaccctctaaatgatccttcatcccaaccgttctcttcaatgaagcatctctgtttgcttatatttcccctcttgtctacaaacagaaacaaagttgaaatctggaaatccaaacttaaatgatacagtatgaaggccaagtaatccgtctgcttgaggatctagaaggaattagaatactttgagacttttcatgctgtgttgctgagtttattgaaacatttctacttttgtgagaaaacaaggtgcaagaaatcaagccatcaaaatgcaaaatagaatctcaagaaatcagaatgtttatccagtagcaaaaatctcaggaatttattgagattctgttgtgcattttaacagtgttactcctagtctaaagtggaatttggttctgtctcctgctcctcccatctgtgggttgccctcaactttgttctcactcagacatagaccaggataccatgctattgttactctatcacttaggtttcataatcatgaatcaaccaatgctccaaagaaaactgctctgagaaaagacatatttcaaaagctttttcagaactaatgtagtaatagtaattcattcttatatattacctgctacggctaaatcgaatgcttgataaaatataagaaagctcaaaccagattacatttgaaatatatcatttgggaaaacatgttttaatttgaagacacattgaaagtgattagctacattaaagatttcaaaatatgcattgtattattctgccgtatcataagtggtctatcagccacaataaagtttaaaaaaaaagcttatatccaggtaaatcatcttttgctttgaaaagacaaaattatttctcagaattattttctaattaatgtaactttatttgataggtcaaggcaggagttaactacctttctgttggtgtaattagcttcccatgtctctggaggagctaagtatatgcagataagaaaatgaacaaggtaagccgggcgcggtggctcacgcctgtaatcccagcactttgggaggccgaggcaggcggatcacgaggtcaggagatcaagaccatcctggctaacacggtgaaaccctgtctctactaaaaatataaaatgttagtcaggcgtggtggcgggcacctgtagtcccagctacatgggaggctgaggcaggagaatggcatgaacccgggaggcggaggttgcagtgagccgagatcatgccactgcactccagcctggacgacagagcaggactccgtctcaaaaaaaaaagaaaaagaaaatgaatgaacaaggtatttagagaagatactctcagtgctctgcacagatccccttgaacaacttttaggtcttctgtgagcccctccccagacttgagtgtatttctgtttccaattgctagcacctgtgactgttcttcctagggcagttcttaggttactggagctgctttgcctgcagacaaacagagccaagagcctctagaagtccaagcatctctttctttcccagcagtggctcataatgactgtctattgcctgaatatgaaagctcagctaccttgcttgggttgggataaactctgaggtatgacgtacactccacagctccctgcaaaattaggccaaaaccaccctccatgaaactttgtttgaaagtgtacccttgcttgactgcttctctttctctgtctgcttctttctgtcactcaaagtaggttttcctggaagtatttccttaataaatagctttaatataaataatttgttccagggtatgcttacagggaagtctgagaaagtatttctgcttaaaacatctttttcctgtactccacattttgcagatatgttctgagttaataaatcttttaagctgtgtaaatataccctctgagagagaagaataacaaaacagaacattcccaacaaactaaaatgaccacagatccagtaactaaaattcaacaaccagattgcctgtgtgtatgttgtttttcaaggtagccaaggcatcatgagcatctctatcaatgtcattctttccatacccaaaggagtgcaattccaagatgttgaaactgctgagaccaagctctggctggaggtctaatttccacaagtaagacgcttaggtagcaagatagaaaaggagacttagtaggagcatttgcttggaacgaaggattttaatgtgtttgattggttcagagatcagatgcagagcagaggctacaagagcaaaccactgttcaggatactcacacaaagggactgacactggagctgatctagctgcagttcagctacaaatctgattgggattttaatccagatatttagagcatacaggtggcctaaaggaaacctactaaccctgtctatttataaaaaccaagtctgggtaattttctcctaattttggataaatggtaaacaaacaaacaaaaaacatagtaccctatgaaagccatccagtagcaaaaatgaaaaggaacaatgtcctgaagacaagaggaagagcagacctctgaagattatttataacaggaaccagagaaaatttaaaagactgtttatcatacttaatctgatttaagaagtcattgcttttagtaaacaggaaaagaaagccacaaaatagacaagctgagataaagggacaacaggatgagatgaaaagaagacaggatatgaggccaaggcaacaagctgggatgaaatgggagctcacagtgagataaaggaggtgccgagggagtccagcagaaattcaaaattaaaaccattttcatgtcaattcctccatatacatacacatcccataacggcacatagaagaacagaagaaagtaataaaagatatacaggacaagtgaaggagatacaaacgaaaaattttgagtttctggaaagaaactagattaactggaacagaagtagtaattaaagatgcaattgaagaaaactgtcctaaactagggggttgaagaggaaaggggtgggggaactagcaatgcagattacaggggctgaccatgatccaggcaacattatttaaaggacaattagacatatatcctgatatttttaaattataagaaaatagattgagatgcattcagaaacaaaaaatacaagttatctataaagcaattaatatttacttggccccatagaataacttgtaacactaaatttcaaagaatgatgaagcagatttagagtagtgttcattcattcgacaaataagcttctagtgtgagcccagcattgtgttgggtactgaaaatacaataatgtaaactcttagaacctgaaatgatctgtatatggaattaaaggtaattcgtcatcacaattacataaaaggtttatgtaaaggtataagcatcacaactatttatatgctgggctctaccctgcagtttctgactcagtaggtccaggacaggtcccagtaacttgcgtttctaagttcccaggtgatgctgatgtagctagtaccagaatcacacattgagaaccactgatttgcattaacaaaaatttgcgagggaatagaacagaaatgttccactgcagtggaattattacatcattttagtcactgaaataaacagccttaaagattatttaatactgtataaaaatcacaatcacacaatattgcatagataagtcagtgtgtgagacttgacatattaagctctttacagaaagtggttaaaaaaggaagagatagctatccaatgaacaaagatagtgaggaaatccaaaaattgttgccagtgattatctctagactatatccttatagttaaatattttcatctttttactgtattttctaaataattgtgcattaattttatattgagaaaaagaaaaaaaatctccagaagacccagttcaaatattgtcttcttggtaaagctcctaccagtcccctataccattaactcaagtgccagctatgaattctgttattgcaccataaaagcattcatcaccttctttgtctttcattaaaaactaactattctaatcccagctactcaggaggctgaggcaggagagtcacttgaacctgggaggtggaggttgcagtgagctgagtttgtgccactgcaccccagcctgggtgacagaggaagactctgtctcaaaaaaaaaaaaaaaaaaaaaaaaaaaaaaaaaaaaaaaaaaacctgactattcatgttagtactttaaaagttctgaagagtctcagtttttaaaaaggcttgtttattcttgcttgttccaggattttcaaacttgtctacaaaactatataaaccatctattaatgttctgcaagtaagtggtccacacagtggagttagccaccaatttgcatttattgaatgaatgaatgaatgaatgaaatcaatgaaccaatgaatcattgcctaaaatacacagaatacctatttattaatatgtttcctagtggtgaacctaaataaagagctttctttcaaagggcattaacaattttacttgtgtttacttatgcttctcatttccaaagtactcaagatagagtgtctcctgggtgcagggcattctgacatacaaaagcatcttattttacatggtcttatgtcagccaagtgttagtgcattacatcctcacttatctcagccttcaaaaatatttaaatcacttgtcatagatgattgtgtatctacatgatcattatttaaatttaaccaagagtgataatttcatacaatatgggcaaaaaatgataataggagaatccaagcatcctcttacagaaacatacaaataccagatggagtttcctgcattttgaaagttgatgacactgtatttccaaacaaatattgtatgccaaaaataagagcccatctggaattttataattaattattttctctgccaaaaaatttcttccccactttagtggctatattccatcccattactaactcggatcatgggatttcttatggtcctttatgtttttcaggagttacatacaaatattttaaaagtatggaaatatttgataacttagcaacaaaagtaggatggaatgcaatcagatgtaaacagcatgcttcccagcacaaacatacatcaccaaagacaaatagaaacaaaagtctctgacataagggaacagtcattattaaaatttaaattcactgttattttcacgtaagggttgcaaaatgcttctcccgcaacaccgcatatacagcaagtggccccaagtagtttgttcaataacatacaatggaattaaagaatgttgtgattttgaaagagaagaagaatccgggggtgactgaaattaaagatggtcattttgttgtataaactctgttttttaaatgtctttcttttaacttttaagtgcaggaatacaagtgcaggtttgttacataggtaaacttgtgtcatgggggtgtgttgtacaaattattttgacacccagatattaagcctagtacccattagttatttttcctggttctcttctttctcccaccctccaccctctgaaaggtcccagtgtgtgttgttaccacctatgtgtccatgcgttctcatcatttagctccaacttataagtgataacatgcagtatttcattttgcattcctgtgctagtttgctgaggataatggcctccagcgtcatccatgttcctgcaaaagacaggatctcattgctttttatggctacatagtattccatggtgcctatgtaccacattttcttatccagtctatcattgatgggcatttaggttgattccatgtctttgctatcgtgaatagtgcagcagtgaacatacatgtgcatgtgtctttataatagaatgatttttattcctttggtatatacccagtaaagggattgctgggtctaatccctttagaccaaaggatacttctttagaccaaagtatttaggtctttgaggaattgtcacactgtcttccataatggctgaactaatttacactcccaccaacagtgtataaagttttcccttttttccacaaccttgccagcatctgttgtttttgttgttgttgttgttgttgttgttgttgttgttgctgagacggagtctcactctgttgcccaggctggagtgcagtggcacaatctcagctcactgcaacctctgcctcattggttcgagcaattcccctgcctcagcctcctgagtagctgggattacaggcacacgccaccacacccagctaatttttgtatttttagtagagatggggtttcaccgtgttggtcaggctggtctcaaactcctgaccttgtgatccgcccgcctcggcctcccaaagtgctaggattacaggcatgagccaccatgcctggcccttgactttttaatagtagatattctgactggtattagatggtgtggttttggtttccatttctctaacaatcagtgatattgagctttttgcatgtgatttttggccacatgtatttcttcttttgagaaatgtctgttcatgtcctttgccaactttttaatggagtcatttgtggtttttttcataaacttaagtttgtttttttagatgctggatataagacctttgttggatgcatacatatgagaaacacagtgtagtattaactgataataaagagaagcctttgtaaagttagtgttctttttaaacatgatttagttattcaactttagcatcctgtaattctaattttcagagctggaagccttagaatattagaaatccaagattttgaatgatttttgtttgtttacaacagccagacatatcccaggcaagcaatagaatttagcgtggctggatgggccctgcaataaactgatataagcatgagcaaactgaagaaaacggcagcccctactcagtgatagttaactattttcacccaggcttactgctgcccgatcttctgattgttaaagagaagctgaaaatctgattcttatctgaaatttctcaactttgaaagtacgtttcagagaattaaaatgcatttaaaaattttaaaaatagtgctgaccaaagagatcacatctgtacactggctctactacatgggccactggtctacaaggaagaaactacgatgttgattatggagtcacctgtgtcaagtgaggacttgctacctccaaggactattctaggggtctacctgaaccaaggaataacttattttcccttcgatatacttgatatatggttacttggttatcaagttccaaatatactgttagaccttttgaggatctatcttgagttgttaattgccttcagggaggatctgccggtatcacctttcctccttctccatagattgctccttgtgcatgtatcccagcctagctatatcctgctctaacccatactcactcatcataagcataggttatctttgagtagaagactaaatcaatctctaggcaaaattattgtgtgttaaaaatataattcctacaggggaagccattcttgaaatatcaacatttctagatagttttgtgtttttagcttaaagatgccacttaaagtactggaggttggagacatgtctggaagaaaagcatagaaggaaaaaaaaggcagaaagaggcaaagttatggggtttatatggttgtagatttaacgctttgatctggaaaagacagtgcaggacatggtctcctgtgattctggcctatgaattgatagataaacctctagaatagcaggtcattgtaaaagactgccttttcccagtcataatctttcttctatcccattcccaaaaaccttcctgaaaagtaacctataggtctacagaaaagaatgttattatttcataaatctgagccagaactatttccattactttgaaagatgtagaagaagaaagacacatattaacggacaaaacactctcctaaattgcttggatatttcaagctttaattctattgtcaattacctaaaatgactgtgaccagcatgggtctgttcatttattcaaccaatatttctttagtacctgccacattccagacatttctgcagtgggtaaagacactgtagagattcaacagctagctgaaacctcaaccagtttcaggcaattcttacatctttgatctttatcatcaaaaaaggagcccatagtactaattacacgggaacaaaacactttgatgtatttttcacctatttattcaattaatatttattgagggcttacattataccagttactcttctaaatacaagacaccaaaaaataactttttaaaaaaacttcctgtttccattatgtgtaaatattataattggatgtatatttaatagaaaatgttgactgggcgtggtgactcatggctataatcccagtactttgggatgccaagacaggaggaccacttggggccaggagttaaagagcagtctgggcaacatagagatactctgtctctacaaaaaattagccaggtattgtggcatgtacctgtggtttcagctcctcaggaggttgaggtgagagcatcatttgagcctggaagattgaggccgtagtgagctatggtcacaccactgctctcaacagtgtgagatgctgtcaaaaaaaaaaaaagaaaaagaaaaaagaagagaagaaaagaaagaaggaaaggtagaaagaaaagaaggaaagaaaatgtttctacatttgtgattgagtcttttaaaacatatgtatgtcacatgaaacccacctgcataatttcacattgcatatgtagctaatctatattacaataaattttttttaggccaggagcaggggctcatgcctgtaatcccagcactttgggaggccaaggtgggtggatcacctgaggtcaggagtttgagaccagcctgaccaacatagtgaaacatgtctccactaaaaatacaaaaaatacaaaaaattagctgggcatgctggtgggcacctgtaatcccagctatttgggaggctgaagcaggagaatcacttgaacctggaaggtggaggttgcagtgagccgagatcgtgctattgcgctccagcctgggcgacaagagcaaaaagttcattaaaaaaaaaaaaaaaaaatttagttctctgagactaggttaccttatgtacaaattggaagtcataatattaataaagttataggacttaaatgagataaactaggaaaagaaattagtatatagcatatagtatgtaacctttatttttattattatgtaaatattgatatgtatattttggacactggagtttggttttgtctacctcaaaccagaaggtttacactaccttgcagaaacttcgtgggagaagagttggaatatttccctccagctgtaccttatgtttcagaatagaattcatcctgctgtaatgtgtcagcttaggcaggtcagtttctttaaagacaatgccatagtttgggcttagatacaagtcaattctatcaattccaagaaaaaaaaaagaatatctttaaaaatcaatctcaaaatatttcatcgaagctgttgctgctttgcttcctagacaaggatgctttaggcagcaggagtttcctttagattttttcatcctttcctttctcctaagggcagaaattaagcattcttaggttgatctttttcttccttgtgtaattcaagaccagagggaatttcaagcttcctgttcatcagcaaaataaactgatataaaatgaagagggaaatttattctcccctcatcaccagtttaggaaaggaaagttaaattatgttccaaacgtttatcttgtatatggtatttgataagtggttgaaggagcttattgtacagtgtaaaggagagctctcaaaaacttagagggaatgagttattaatgtgttataaatgcaccataaagaaaaaacttctggcttgtgacactgtttgtgaatttttgtgtgtttgaaaacatttccaaggtcatgtttttaagggcaggacttgaaaacagtgatttcactatggaattctggcattctctaaacaggacttctttgtgagcacccttgatcttggtattttttgtctcttcaagatgagctatgagctcacctatttttgttttccttctgctgagcaatactgttcctgggctcttttgttaagtcacaataaactaggcaagcaaccaggaggtccttgacacaaagtcctttattgatctgaaaaccacactgtgctaacctcaccttaaaatcctatagcataaatctctagttcctcaaaaacagccaaagtattaacaccaaaacactagatatccttgttttcaatgcatatttgacaatttagaaaaggtagttctttatgaaaaaaattgttttctttttagttttaaacttttatgtccaacatcttccaggtctctcttgaagataaatgttttgcccttttgtgccaaagagcacaaaaatacagtcaggccaatgtcatgattgtagggttggagttgcaaatttaaaagattctatgatgctccttaaattataatataaaagtattttataataagagaggcaaggaattgtgtatcagagagttatgagaattataatgcctgaagttatatatgtgaccaaatgaaaggcttttaatttgttaggaatttgctcattcattcacttacttattgactcgttcattcaatggctagtatgagccagaatgtgtggtaagatgatatagttacaaacaaaaccattctgttctctatgatcttggcacttacagcctcttagggtaaaatataataatcatataaacaaataaaataatccacaaattatgcccactgcaatgaaggacattaacagcatgctgtgatagacactaatggaggagaagaattcagctcctgtacaatcctggggagtgagtgctccagtcaaaagcaacagcaggtgcaaaagcctcaatgtggccaaaatatagtaaagcagtagaagagtagcatgcaaattgatgtaaaaattgtgaagctctacgtaacacataggtgatgttgcctgtcctgcactgttctacatgataccttccccagtgtctccactttggtcaagattacatgtccccgttaattgcttgaattcaccctttacttacctgtccccaaatatttgttcatacttgaatgctatttctccctcatgtctaaatgttgtcattctgcaaagcaaaatgcaaaaaaaaaaaaaaaaaaaattagggaaaaagagtatacattgtgcgattcaattaatggaagattctagaaaatgccaaattcatctgtaatgacagatgcctggttgctgggggtgtgtgtggaggtggctgcaaagaggtacaaatggaatttgggggatgatgaaagagttctgtatcttgatcgttatggtggttatgcaggtggattatctgtcaaaactcaacaaactgtacactgaaatggcatttatcatatgcaagttatatcttaaataagttgattaaaaagttatagaataagaaaaacaataaaaagcttaaattcatcttctccattatctctctaataagaaataacctttctttctatcatcatggcatgtactgttcatgtgttataggtttttgtatttgtgataagcataccacatagagccctcagtgaatgtcatgatgttaaagtgactatttcttcattgggtttgcatattaccttatgagagaaatcacgtctcatttgtacttttctccccccacagcacctagcttagaatacataaaagaacctcactgagcatttggtaaatcaatagcaatatttttatatttacatcctgactggttcccaaaaaggatgagcaggaaaagaaattgatttccaggagttgataaatgaatagactgttcttggcactggagcccacatcctgtctccatatgtaaaaattggtggtagaaaagggttttcaacctaccttcttcacactcatgcttacttactgatttaatgaaatgcttgtgatggtttctgtgttctccagtaggtaaacgctatacagaccctctgcattatccttcttaatagtccattattcctctgtagagagtccagtggtagaatcagcgttgtcaagctgcaaggaggggacacaaaagtgttataggaaggtgacatttatgccccattatgagtgaaggaaaatcgaaggagcaatagtggtctattgcataactgcccctgttgggttgttatgaggagaactgtgtaaatcagccctcgtgcttatccttgagaaattctttttcccctttcctcatagcctctctctgtgcaatttttggtgttctcaactggccgattacctagaatattagcttttcaaaatatgacacagaagttcaccaattccttccaactcataacactttaaaattgcaattccaaattattcctgtaaaaatagctgatctttatgactcctaggggatttcttattttaatctgaaaccttcagaaatggttcagttttgtgaaaatgatgggggaatgtctgcccttagcagtttttgtgttcaagggcaaatcaacctctgtgcttgctaactttaattttccaagggttatgagactttaatttgattctttatccagtgtgcataaaatgttcactggaatttgcataatacatttattgtataatcattcttcacattggttacctgcttcctcaaatgaacattacttttttaaagagatgaattaatgtagggccaatttgaacttagtaactaaacagaattaaatatatctctgatgaacaaacataaaagagacagggaaggagagcagatacttgttctgaaataggctattatgagaaaatagccccagtcctgtatttttaaatattcattttgtacatataggcaggagaagaattgctgtctttaaaaatataaagatttgttatgtgaagaaaggaatacatttgtctggtttctcttagaatgtatttaaaacaaacgaattaaattaaggtgctaaatttcagcacagtctaaaaagatgagggagttggagagagaaaatgcctttggcattaggccaggtgctttaaatgcacttaaatttattcaatgcccagaaccgacatagaatttaggtagtgttattattatccttatttttggttgagtgttctgtgcctgaggactcattgctatcaaatagtggagctagtatttgaatctagactgcatgatggcaacatctgtgcctttcaactacaacagttttctctgaaatacacttatctctcatggactgccttggaagactgtgtactccctaatattagaattgtccaggtggagtttggaggagtgtttggcaaagagattgtaggaagattggaagatccaatagaggttcaagaagatgacttttaagattcccattctctctatagttttatgagagtagcaggtgcagtcctgacttgctgagtggcttgttgcagtccagggagtctcaatctttaatgtgcatatggctttcttggggatcttgtcaaaatgtacagcctgattcagtagacctagggtaggcctgaaattgtgcacttctaacaagctcccaagtgatgccaacattgcttttccacagctcacatctgagcagcaaagtagaaaacctctcaggcgaggtgcttttgatttctgcttgcagagccattttcctagtttttcaggtcttgaccgtagttgggacaattatataaaaacatcctaaactaaacagttctctaaactgtatctgaaccaccatgtcctaggatcctgaaatgctgttttccttatacaattaggatactgcctagaggagagatttcctctgtaagtcatgaacctccagcaatttaaagggacacgaaagagctgataccatcagcaagcatactaatttacaaattacatcaaaatgttcttggagacaacatatctttgttgaaaaaaaaattccactttcaacttataaataaatatgtaatcatggtacaattacatgactattcaaacttttgatatcctttttgaatcacagatctcaaattttgtctcataagattctgatatatttccaaaaatcctttgagatggatccaacttaattacaatgaaaagaaaaatgggcttccaatcccttgtatttcaagagatgggtgtttgaatttgatctaactggcttctgatatctttggcttgcaatgcatgaaagtctttttttaaaaaaaagatctttgaatgaaacaaaaaacttaggaaaaatcattctctaaagtctaggaggctttgaaagcattgcctatttccatttcattaattttaaaaatctttccaaatcttggaataaaatcagttttgcaagttaagaaacatttagctaaggcaaactgtatagctcagaaatctttcagaaagggttaggcaattggaatgctgaaaatattagattgatgggattatagagatccatatttaccgaccaagaaaagcagttgcttagggaaaaatcagatgttaaaattgtatgtataatctgatatcattttggctaaaataaggaaaacaattttattaaaaatttattatcttggatggtggcatcatagctaatttctctttgtattggctgaattactataataaaattacataacttataaaattagaaaaaatcaatagtcattttcttatttttgaaattttaatttttgtgagtacatagtatgtatatatatttatgaggtataggagatattttgttacaggcatgtaatgcataataatcactttatggaaaatgacgtatccatgccttcaagcatttatcctttgttttataagacatccaattcttttagttatttaaaaatgtacaattaaattattttgactgtagtcaccctgttgtgctatcaaatactagatattatttattctttcaaactattttttgtacccttcaaccatcctcacctccccctcatcccctgctacagttcccagcctctggtaaccatccttctactgtctatctccatgtgttcaattgttttgatttttatatccaacaaataagtgagaacctgcaatgtctgtttttctgttactggcttatttcacttaatgtaatgacctccagtttcatccatgttgttgcaaatgacaggatctcattctcttttatggctgaatagtactccattgtgtataagtaccacattttctttatccattcatctgttgatggacactgaggttgcttccaaatcttggctgttgcaaacagtgctgtaacaaacatggaaatgcagatatctcttcaatatattgattttccttcttttgggcatatactcagcaatggtatttctgtatcatatggtagctctatttttagttttttcagaaatccaaactcttctccatagtggttgtactaatttatattccctccaacagtatacaagggttggttcccttttcactacaacctctccaacatttgttattgcctgtcttttggataaaaccattttaactgggctgagatgatatctcatcatagttttgatttgcatttctctgatgatcagtgatattgagcacctttccatatgcctgtttgccatttgtatgtcacccttgaaaaatttctattaaaatattttgcccatttttggttggattattatattttttcctatacagttgtttgagctctttgtatttactgattatcaatctgtcagatgggtagtttgcaaatattttctctcattctgtgggttgattcttcactttgttcattgttttccctcactgtgcagaagctttttaacttgatgagatcccatctgtccgtttttgctttggttgcctgtgtttctccaatgttttcttttagtagtttcatagtttgaggtcttagatttaagtctttaatccattttgatatgttttttgtatatggtgagagacaggggtcaagtctcattcttctgtatatggatatctagttttcccagtaccatttattgaagagattgtccattcttcaatgtgtggctttggcacctttgtgaaaaatgagttcactgtaggtacgtagatttgcttgtagattttctattatgttccattggcctatgtgtctgtttttatgccagtaccatgctgttttggttactatagctctgtagtataatttgaagtcaggtaatgtgatttcttcagtttagttctttttgcttagaatagctttggctattcagggtctttgtgattctgtagaaactttagaattatttttgctatttctgagaagaatgtcattggtatattgatagggactgcattgaatcagtagattgttttggatagtatgcacattttaaacaatattgctatccaatatccaatccacaaacatggaatatttttaattttttttgtgtcctcttcaatttcttttatcagtgttttacagttttaattatagagatatttttcttctttgattaattcctaagtatttaattttatttttgactatagtaggtggaattactttttaaatttctttttcagattgttccctgttggcatatagaaatgctactaattttcgtatgttgatcttgtatccttcaactttactgaatgtttatcaattctgatagtatttttggtagagtcttttaagttttttcaaatatgagatcgtatcatctgcaaacgaggataatttgacttctttctttgtcatttggatgccctttatttcttccttttctgacttctctagctagaatttccagtactatgttaaataacagtggtgaatgtgaatatccttgtcatgttcttataggaaagggtttcagtttttcctcattcagtataatactagtcatgggtctgtcacatatggcttttattatgttgaggtatgctctgtctatacctagttttttgagggtttttattatgaagagatgttcaattttttcaaatgctttgtcagcatcaatcaaaatgatcatatggttgttgtccttcattttgttgatatgttgtatcacattgattgatttgtgaatattgaatcattcttgcctccaagacgtaaatcccacatggtcatgatgagtgatcatcttaatgtattgttgaattcagtttgctagtattttgttgaagatttttgtgtcaatattaatcagagatattggcctgtagttttcttttactgatgtaacttttttctcgttttggtatcaggataatactggtctcatagaatgaatttgaaattatttcctcctcccctatttttcagaattgtttgaggattggtattaattcttcttaagtgtttgatagaattcagcagtgaatctgttgggtcctgggttttccttattgggagactttttattatggattcaatctcattgttagttattggtctgtttagtctttggatttcttcataattcgatcttggtggtttgtgcatatctaggaatttattcagttccctttgattttccagtttattggcatatagttgctcacagtagccattaatgatcctttaaatttctgtgacataagttttaagagctccttattcttttttattttttcttttgagatggagtcttgttctgtcacccaggctggagtgcagtggcacaacctcagctcactgcaacctccgcctcccaggttcaagtgattctcccacctcagcctcccgactagctgggattacaggtgcttgccaccctgtttggcaaatttttatatttttagtagagatggggtttcaccatgttggccaggctggtctcaatctcccaacctctggtgatttgccttggcctcccaaagttctgggattgcaggcatgagccaccatgctcagcttcctttttcatctcttatttatttctttatttaggttgtcttccttttttttcttcattagtctggctaaaagtttgccaattttgtttatcttttcaaaaagcaaatgtttcatctatcttttgtattattttctttgtttcaaatcatttatttctactctgatcctgatttcttttcttctaactttgcgtttaaatcatacttgcatttttagttctttaagatgcatccttaggttctttatttgaattttttcttattttttgatgtaggcacttataactataaacttccctctgagtactgctttttctgtattccataggttttgatatgttatgtttccattatcatttgtttcaagaaatgtttaaattttcttcttaacatctttattgaaccactggttattcaggagcatattgtttaatctccttgtgttcatatagtttccaaaattcctcttgttgatttctagttttatttcactgtggtcagagaagatacttgatattttttccattttttaaatgttttaaggtttgttttgtgacctaacacataatctatcctagagaatgatccacatgatgaggagaaaattgtgtattctgttgtctctggatgaaatgttttgtaaatatctattaggtccatattttctatactgcagattaactctgatgtttctttgttgagtttctatctgggagatctgtccaatgctgaaagtggattattgatgtcttagctattattgtattgaggtctacctttctctttagctctaataatatttgctttatatatcagggtgctccagtgttgggtgcacatatatttagaattgttatgttcttatgctggattgacccctttatcattatgtaaggacgttctttgtctctccttgcagtttttgtcttgaaatccattttttcttatataagtgtagatacacctgctgttttttggttttcattgtcatggaatgtctttttttttccatccctttattttcagtctgtgggtctttatacgtgacgtgggtttcttgtaggcaacagattatggaatcttattttttcatccatttagccattctatgtcttttgattagagagtccatttacaatcaatgttattattgataggcagggacttattctttccgttttgctatttgttttctggttgttttgtagtcttctcttccttcttaccttcctttcagtcttccttttagtgaatgtgattttctctgacggtatgatttaatttcttgctttttattttttgtgtatccattgtgtgtttttttgatttgaggttacagtgaggcttccaaatactatcttataacctgttattttaaacagatgaaaacttaacactgattgcataagaaaacacacacacacacacacacacacacacacacacaagaaaattaataaaaaccctacactttaacttcatcccctgctttttaactttttgttatttctctttatgtcttattgtactgtctgtatcttgaaatgcaattgtagttattgtttttgattggttcatcatttagtctttccacttaagagtagtttacacaccacaattatagtgttatacaattctgtgtttttctgcatatttactattaccagtgagttttgtagcttcagatgatttcttcttgctcactaacatcttcttctttcagattgaagaacaccctttagcatttcttataaggcaggtctggtgttgataaaatccatcagctattttttcatctagaaaggtctttatttctttttcacacttgaaggatatctttgtcggatatactattcaagggtaaaagtttttttttttttctttcagtactttaaatatgtcatgccactctctcctggcctgtaaggtttctactgaaaagtctgttaccagatgtattacagctccattgtatgttgtctttttttcctcttactacttttaggatcctttctttatccttgacttttggaggtttgattattagatgccttgaggtagtcttctttgggttaaacctgcttggtgttctataactttcttgtgcttgaatgttggtacccttctctaggtttgggaagttctctgatattgtccctttgcataaactttctacacataactctttctctacctcatgttttaaggcaaataactcttatatttgcccttttgatactactttctagatcttgtcagcatgcttcattgctttctactcttttttgtcccctctgattgtgtgttttcaaataggctttcttcaagctcactaattcttctgcttgatcagttttactattgagtgactctgatgcattcttcagtatgtcatttgcatttttaaactctagaatttctgcttgattcttttaaattatttcagtttctttgttaattttttctgatagaattctgaacttttttgtctgtattatctttaattttttaaaatttcctcaaacagctattttgaatactctgtgtgaaaggtcacatgtctctgtttctccaggattagtccttcatgcattatttaattcatttggtcaggtcatgtcttcttggatgattttgatgcttgtaggtgttcataggtgtctggacattgaagagttaggtatttattgttgtgttcatggtttgggcttgtttgtgcccatccttcttgagaaggctttccaggtatttgaaaggacttaggccctcagcccaatatttctgtggtttttgcagactcatagaggtaccaccttggtggtcttgggtaagatctggaagaattctctggattaccaggcagagactcttctccttttcctttactttctcccaaacaaatggaatctctgtctttgcgctgagtcacctgaaactggaggtgtggtgatgcactgggattgacccagtgtggttcctgtggctgccatcaatgtgactgctggatcagacctgaaacctgcatagcactgagtcttgcccaaggcccactctaaccactacctggctgtcacctatgtttacaaaaaacccttggcctctacaatttacaggtggaaaatccagccaagtttgtgtccctaccttcaggatggcaagtttccccaggccccaggtgggtccagagatactgtctgggagccagggattgtagtcaaaaaccttaaaaatttgactgatgctctgttatactccagctaagctggcactcagtccacaatataaagttctttccactcttcccctttccacaggcagaggagcctctccctgtgggcactgccaccactggcccattgaggggttctgccaggccactgcccatgttcccttaaagcccagtgactcttcagtcagcttgtggtaaatgctgccaagcctgagactcacccttctgagaaattggatctcctctggcccagggcaggtccagaaatgctgtctactagcctaggcctagacttagtgaccctaagagcctgctttttgctctatgccacagtggctgaactggtacctaagacacaagacaatgtctcctttacttttccttcctctacatctcagagcccaaggcccatagcaaacaacctgggttttgctgctggttattcagggcccaatggctctttagtcagcaggttatgaatccttccaggactaggtccttcccttcaatgcagcaggttgccttttggcccagggtgtttctacaaatgtcatctgagagctagggcccagattagggggcttagtattctgcccaatgccctattctaccacggctgagctggtattcaagacacaaggctcctctttactctttgctgtctgccccttaggcagaaggaaggagacactttcattgctgtgagctgccttacttatggctgggggagggatggcacaagcattcctttagctgccccggctggtgtctccctaggtctcatgccatgccaccctagtcctctggctctgagcccagtccagcactaggagttgcatatgagttgcagtccctgtgcccttgactgcctttcagagtttacctaggtccccagagcactttggcctgtgatggcaaggcttgccaggaaacttgggtatcaactgatgagatggatgattcttctctggctaggtctggtccaaatgctccctctgtgtgtgggcattggctgagcccagtatagctttgctctccactgtggcagggcagcactgagtttaatgtaaagtcccccagttgctgtattctccctccctcaaatgcacagactctttgctgcatggctcactacctgtggtgttggaggggtggttttgatgcttcaggactgtctttcctgttctcctcaatgtctctttcaagatatgaagttaaaattaggtactgggattgctcacctgagttttggtccttgagatgatgcttttctgtgtgcagatagttgctaaaatttggtgttcctgctgggggtacaaactatgtaggtttctattctgccattttgttctatcctttatcaactatttattttaggaaaaggaatgtgtgtacaattggagagccatttacaaaatctttactacaaatgtttttgattttataatttgtgataacaggaactatacttttataactctataaacctctgggtgtccctaatacatagaatagtgagagctcgagagttagttttagttgcctttccaggtaggaccatcagaaggaatgacagagcagtttgttttgaaggtagactaaagcaccaaggtctaggtgtaagggaaattacgttttactgaattgtgttttgtttggcttgtttttgtttttaccgtgtacatttgttactctcgattgtgcatatatacatataagtgctttttttatttttaaaactctaatacttagttaaacttgtatttgatatgtcaagtgggatggagaaaagtaatctggagtataagaagatgtagaatccaccgtgtctcatagtgacagggacagtatttgaggatatttatttaaaatatttgaaataaggcctataaatgtgtgactgaagagcatattcaatcaaatatgagtataaattaggaagtgcacaattgtagttagatagaaccttttatcaaagattttgaagggggaaatcatggatggaaccctgtcccaggaaaatgctagtgtgcaaaagcacacacggctctataaggaaatttagatcaagtgacaagttggcggagggaatatacagaatgtacagtatgacaaaaacaaagaatcacaggtaatacatgcttcttttttttttttttttttttttgagacggagtctcgctctgtcgcccaggtcggactgcggactgcagtggcgcaatctcggctcactgcaagctccgcttcccgggttcacgccattctcctgcctcagcctcccgagtagctgggactacaggcgcccgccaccgcgcccggctaattttttgtatttttagtagagacggggtttcaccttgttagccaggatggtctcgatctcctgacctcatgatccacccgcctcggcctcccaaagtgctgggattacaggcgtgagccaccgcgcccggccaatacatgcttcctaaaggggttaccccatatgtagaattcacttttcttcttttctgctctgaactatttcatgtatctttccgggttgttgcccaattttattataatggtctatcctctaaagatgaataggtggtaaaaagaaggatgcttcggttgtggggaagagtaagtagggatgagtacaagcatgcttcccaggccatttgctgaaactattgagtgtgaatatggattaaagtacctgggaagaggtagggggcttgtcctccagttgatacactgaggtcattacctctattccttgtatggaggaatagtctattgttctacccatctgtaagtctagagcaagggggagggaagaatgggacagccaggaatgaaattttagttaggtttgcctatcctaaattggggctggggtttctagagctataattaaagtgttcagtcatagcccacttttgtcataattataaacttgttggaattgttttattaatatgttgggcttgctcatgcagtcaccattacacacttgtacctcctgctgttttgatggtagagacacacaggaccaacagctcaaacaagacatatattttatttgtatatttgaacactgcatgttagcaaagcaaagctttgctagatggttcccagaggttaatctgcccatttactgccaagtacgctgctccttaatctgtgcaatattataataaaataatggttggtctttggcaaatcagtaagtttctttaatctcgataaagcatagtgactgcactaagcccataaataatgattctgatactcattttgactttattcagtataaagaagcaatttctctcatttaaaaatcaattgaacatgatgaagaggaaagtgagttttgggatttgaatttgtgtttagtttaataagattttttgtgtaacataaatggaatgagaaagtgttccattttcaagtgccgtactactaaatactttgctctctaaatttgtctgtctttgtaattgttttattctgctaggaaataccattggggacctattccttttccccagtccttatttttgtcatttgtgtgcaaaatatattgagttttcccccacctggaagaaacagttgccattttaaaatactagcacttttttcccacaatttatatggtagtgattactctctatatcttgtacttaatttcaaacaaactgagagacagaaagatagactaattcatacatatatacataaatttagaatatggataattttaccatcatggcacttactgaatggaacctggctcagttgttcagctctgttgaccagagctgtacaccctaagccatacatactatacggtataaaattagttcaataatatgaagataactgtgtctatatgccatttaaacataaactccactgcatttaaatttatttatcaactctactagacaataaactctttgtcaagaaaagccatgttagagtttttttttccttacagcatctggcactatcttccttgtatgtagtagatgcttagtaaatttaataatataataataataataataataataataaaaggaagatctcattgtggttcaaaaatgtcactaataataggcaaattcttgttccaaaagctgatgtcttattttagtatttctggcacacaaatttcagaatgcttaggcaattaaactggaatatgaggggactccagtggagcaacctgttttctgtatagtggatattgttacccatgttattttactctgtttgctaagtgtctgaggctgcaaccctccctgttcaggcagtccatatgtggcttcttttctgtatcaactccctgcattttatatttttaagacatttgaaagcataggtgattcagactataatggcttagaatttttctcacagtaagctcttttgtctctggcttttgcttttcagcaggaactatcttttgcctttattttttcacaaatctaaggtagaccatatggctatcatattggttcccctgtggtatcccggctttactataatgatcactcacagtaaatggatacaaaagaagatactgaagaaatgagtaggttttcttgttgttttaaaagaaaagttgcaataaatatatcaatgctgttatttcattatcttctgtgatcacataatgcaaagaactaggaaatccaataaggaaagatagtcagcaataactgaatagtttagggatacagtagaaatacagcagaaatacagaggtatggaggcagtctaagtgccatcagacttccaggcagcctgcaaaccacccctctctccctgcaactcagtcatcctattctgagcccagacaacagccacagagtattgctaagcccaaatggaaggtggggaaggatttatggaaaggtgattcattgttaacatcttcaactgttaaacttaagtagaatttcagctgaatgtatatataattcttagcccaaatgtttgctttttctgtttagaaatcacatttgactcacggttggattgtctttggaagaatttgggtgctacaccaagccatctgtgtttcaagcgagattttatgacagtcattctgaagaggtggaacaatacaaatgtgaaatttagtgtgcagttacactctgagagcaagtctccttggctcactgttgatggccctgcaaatctaaagcaggagttctagttttatcattactttcccccaatacaccccaacacacacacataaagaacaatcccaatgttggtaaataaataagcagtttaaatagagaacttaaggagcccacagcaacacagaagtataaaataagcttttgaagatggtaaagaaacatttaatgaaatttcaaatggattgtcacgcagtggttcaactgaatggcaaaggtctcagggaagatgttgccagcaaatgcactaaaggaaacaaataagaaccatctggacactactattctttgtagaattccattatagatagatagatagatagatagatagatagatagatagatagatacacacacacatacatacagttttttctctacagtcaccaggcttgtagtgcaataaaaatagcaaaactttaaattaacacacagggtttaaaacatttcaggaaagcattgattatatctgccaatggaatgagtgtatttggcaaatgacctaattatcacagagctggttctttctcattgctctacttcccgctaattgcagaactgctggccttctccccctgacaaggaagaaaaacaaggacaggagtgtgtggagaaaacagtgacattcagttttaattcatttgaacctgctgccaagcttaattatgtaattgagagagtgagacgggtgggcttacagccacttgggccagagtttctgatggttagcatttgccagtgttgtgttgaggattttagcagttaccggaaagcattattagctgaagctgaactaatctcccttacccttctcctcaccagatgtaggtacagaggttgctgttcccagacttgattatttgtcattaaggaaaacaaattgaaagcaaattaaagtggctttattccttgctaaatccatcattattctttaggggcagtctcctatttcattttgctttcttctgattgtgatgtagtatctgctgtcatgtaaaactcagtaatgcaatgtttatttctagaatgggagtatttttcagggttacttgagacatttttacataaacttctattgtaactagtgaaagtgtgtatatatgaaaaacacataatttggtgagatatttctgatttggtagcttatcccctatttttaattttatttatgaagcctttatcccccttggcttggaaccatcaatacagatattttgtacaaaagggccaacctctctctcctcgctggcagaatgactctttataagtacgcttttttcaaagtttagccagaacatccctgattcagagaactctcagggtgtctcctaccctcacagaaatgtcctccgttcagattgaagtttagtcctggaggtcaacatcttgattttgtaatatcctgtgtaccatgtgggggtggaaaggaggagaagaagccagagagaaggcacgctagactaaagggtgggagccataaaataagaggctgcctgctgggtggcagcatggctgaaacagaaccatgaccacttagcattatgtgttctttatagcccaacagtattaatagacacttttatcagttaatccccatcataattccatgaagtaagttaacattttttaaacgtgctttccatttattttcacaaatatttattaagcataggctagatgttaggtacagtcccagtacctggggtaatacaatgaaacaacacctggtaatggagagtgctcttttttcttccaggtacaatgggtgaaggggaggatccttgtctggcgaagggcaacactttcatgaagtttctagatacgcccacccttctactctctcaggaatgttattctataaattatccacttgtcctcctgtagttttaatctattttctgcttgatctttcctatcaatattcaacattcaaaaatgccaagaacagtatctgtcctgtagaaagtggtcaataatgatttgttgaataatttacatgaatactcagcagtttcctaccctagcttcacactggaatcaggtgggaaatagacacacacacacacacagacaaccatagcatctcctatcttaaagcaaacaaacagaaacaactcagttgaccttagatcccctgctagctaaatctgtttcttaattcttcttcccagccaagataactgcaaagaggcctgtaaatcctcctcctcatcttgctcatactcttcaactactccagcagacttcaatccccatcacttgcctaaagcaaatcatgatagtgacatcatgtttctaaagacactgggcatcttgaagctatcttcttgctcaaactctcagtagcatttcacataattgatctctccctcctcagaatactttcttaccttggatttgagacatctgattcccttttcatttccttcttcctctctgactctccagctttctttgcagtcttttcttcttatgtaatgcctaaatgctgaagttgtttgagttctaatcctggacctatttcttttatacttactctgggcatttttgactatttcctattaataacatctatatctttgtgctgttgtcctcctatatttccaatttcatctccatttctgagcaccaaactaatatatccagctgcgatttgacatttctatttagatgtctcgggcatttctgactcaacatgtctcagaccaataattagattttccttctcccctgctggttcttccttgagtcttcccatttcaataaattacatatccactcacccagtggcttatggcaaaaacaaaaccaaccaaacaaacaaaaccagtggtaatccttgtctatgtctttatgtcttccttctttccagttcagtcaatccatttacaaagccctgttaattctgcctccaaaatataactcaaagcatccatttcaccctatttcattgccagctgcctttcctctggaatgttgcaatagcccctaagtcatctcctgatcccattctagcttcccagctcccccgcaacattgcaatctcaatttaaaaatgcagatcatttcacaccactgcttctttaaaactttcaatagtgaacaatcaaaaattaaaatctatattatatgctgtcatttactttcaaggaagatctgcaattttgtaattatatattcatttgtatggttatttgttcttatccatctcccaactcaactattagttgcatgcatgggaactgaggttttctcccaccactatataccctttgcttagtgcagtgcctgaaatagaactttattattgaatgaataaataagccgatgaacggatgaggaagattggccaacgtgtaaggtacaaggtggttcccatgtcaatctcatcttaactcatcaactgctccattgacaaatgtacgattaaatgagctcaattaaattatcttatatggaattgttttattccatgccatttaaggaattttcaagaattgagtcctttctctgatgggcttcagaggctactagcatagtttacaacgtagggatataaagcaattcatggtatggtgtatttgaaaggacacatgcagactttacttcaaatcctggatctgctcaatgagtggcttgtgattcttgtcaagttggatcaccttaccctaacctcagtttcttcatgtgtataatggcacgaagccagtagtacctgatgttattatgacttcaccaagtgccaatgtgtcaactacctagcacagcaaccgacatgtgagagatgacatccagattatagttttgctttcttctccccttgaccctatttcttgactattacttccactttttttttctatcttactcatcttactgggtagtaatacttacattacccatttagtttgattttgtagggagagaagaattagcagtacttacagaacaggcttccttttggattagaaatacaaacttcacagcttctctgcccagcttttcaagagcattttacagtacactgctgtgtaacaagttcattttacgataacatgctgggagggagaaaaagaagacgagattcgaggggaaaaaattaaaaagttaattaaaagaaacaacttcgtaattggattcccttgcactcttctttggttattttggggtgagaggaggtgtcacagtacacctccttagtaggttagtaggtttgcttcagtggctcacctcaaaacttctaaatgagataagtataagaatacagatgattccctgcctgacagatgagaagaagtataggatacatatggtgagcttgttaagcatgccaaacaaagctgtccttatactcactcttgagcatttatatttcaaaatattcttggcagttaacattactgttaggctaagccttggactattagctagcttaaggacatacaaaatggacttttcattgatgccgttttactatttctttgctttcaccatatatagacatccacacaagcacacaatcagaatagcataggaaactcatatacccttttcagactgtacactagaaacaaataagcaacatagtatttcttatttttaaaagaaacatgaatatttatgtatttaatcattctttttcacagatctgtacgagtcaaaataatttaagatgctatcattgagatagacaagataatggaagagcatgggcttagtaatcaaatggaactaggttttaaaccctctcatccacaatatttacttattcatgaagtcaacatgtatttattgaatgcctactgtgtgccaagcactactgcagttgctgataaccttttgcgagttcttatcatggtttttgttaacatcaatatttgaggttttgaaaattaactttagggagagaattttctatattttccagcactttgtgtacctcacttttgccataatccatgaagaaagaacacggttaaacagtctattatcttactcaccaaattaggttaaattgggttactgattctacacccaatctccaaaacaatggctagaaaataagagttactattttatgtctagagacattatgatgttatctctcccaaagcattaaggaccactaatctaagagcctaatgttcaaccagggtaatatgtcagaagaaatgaatgcaagtctatctgtaaacttgtacttcatcagtgaagatagagattcagctttttgtgaatattaacaaggggattttgtgttttcacaggttatggttttgtagattttgacagtcctgcagccgcacagaaagcggtagcatctctcaaggcaaatggcgtgcaggcacagatggctaaggtaagattgatgtttaggggtgttttttttttttttttttttttgtgtgtgtgtgtgtgtgtgtgtgtgtgtgaaagagagagagagagatcaggaggaaggaagaaggagagattaaatatttctcctttgctctgagctcactcaaacgtggagtttgcaacaatttggtttatattttcttgttagggaaagtaagaaactccacattaggtttggcttaggagaatctgtctggcttatttcattgtttctttgcctatatttattattgtatcttttgttatggtaacctcattagagacttaaggacactcgtgaagtgctctgttctgcttgagaaagatggggtgtgtctgtgtgtatgtgtcttggacttctactggtaaacagttttagagtagtagaattatcagcaacttgtctttgataaactgtgtgctaaaaaaagtgtgtgttctcttagctggggagagctgattgttgaatgatggggttgtctgatctgtgcagggaaatgagtttaactgaagtgtaccgtgtctgtactgctagaatttcactttggcctttatatgtagagttttctaagatacttttaggtattaataattttcaataattaagtatcattaaatagaatatgtattctagaaccttctacctgaaactgtaatgtattttattatctaagaaaataagttaaattatttacaatccttttgtgtcctgattgcagtggtggttacaagaatctatacctgataaagtaacgtagaactatatatacatattgcgccaatgtcagttccctggttttgatataatcatataaaatgtaaaatttgtagaaacctcatgaagggtacataggctctctctgtactatctttgcaatgtcttataaatctataaatatttctagctaaaaagtcaaaacaattgtttataacatggatgcttattagatgtctgctttaaaatgatggccatttaggatttattcacctgcatcctaagtctttaaatattctttctgattgataatagtgaacttatttatctctagattctataaattttaggtggaatggccaacagaccttgaaatcctgatctaatgtattcatgctctgctcgtgtatacatttaagtattcccataagagttgagtgatagaatgataaggtagtcagattttcagttatttagattttgttgagattgctaacattatttgataacattttccaattttgacctcaaataactagaggtaagatatttggtttcttcatcttcagttgtcttctagtgaactgatacagaccatatctgttaaccttttgttgcaagtcacttcccatatagattactttggtgaactcattgtcctttatgacacatgactagttgttcaaggcagaataaatttgaattctttcagctgtgtaatgtattcttcatcaagattatgcctagaagctttggatttttttcatggactaagattgatgaagttagcatttttaattaataaggaaattatatacatgtcttggtttaaaggttacttggcaaagagtcaatggcattaagtagtgacttcctatacccacaaaacaaatgatgaaatgtagctgttaggtatatgtaaaataagtaacttgaatctggactgaaagtaacacctacttccaagaaaatgaatagaaaaatgcttaacgaaaaagttgttattggaatttcttgatctattccattggtaaactcccaaatctggaagttagcagattgtagcactttagaagtaatgaaaacagcatgcataatctccaccatttcaaatgtcctcagaatatgtatagttagttgttagataaaaaccactgccatcttgtgtaacaggaaaagaaagttgacactgattttataactactggggaaccattatgaatattttccctcagtttcccagcattctgctgcactgagaatccctctttctctctctctcttacccactcccccgcaccctctgactctttcattctctctctctaatcactgatatctcacctagtcagaaggctatttgatttggggaaatattttaaagacctcctaaaacgattatttttcctagccagcattttggccattggctcacgcccactgtacaaaaaatgagattccaattggaatgtttaaagtcacttttatttctgtagtctgctcaaagattttaccttattaattctgctgcctgtgaagttaattcttattctcttagctttagactcatatctgcctactggaaaactttcagcaatgaatgactctgtaatttaactatctataagaaaataaataggctccctttgagaataaaataggacaagcttgaccaccactgtattagcagatttctcactgagctattggatttcatggcattttcctcctttgtcctggtgataactattatttattatcatataaacctgcagtctgctgggtgtgtgaaacttgcactatatttttggccatttaagtatctactgaatcacctcttgcatccttgttcttatcaatatcctactatgcaggttgtggtgtcacatttagtgactccagcattttaaaataaaaatattaccaacactctagtttcccaatagtaaccttcagctaacataaaactctccaagtgaattgtcttatttagctagcttattccagtgtgtgcatatggaaaatccaactgatttgtcaaccaatagcaagttacccaggaagtggtaattgattaataatgaattaccattaacggagatgaacatttttctgtatacttactgttctgccacaaaggagtttatttatttttttttggtatcaaaagtcatgtttcttttaggaaatcagattcagaatattttagtaatacatagtggttaggagcatagatttggagagaagtaaacttggccttgaatcctggctctggtaccacctggctgtgtgaccttggctaagttacttaaatatctctgaacttctctaataataactcttaggttagagaactgctgtgagaattttaaaaaatacattaagtatttagcatagagcctagatcatagtaagaatttagtaaatgttagttattcaataaatattgttatacatttaattcaaatttgctactaaaccttctataaatcataatacatgttttaaatgtgttattccaaattattttctttaaaatatataataagtagcatcagtcagcaaacattttttattgcctactctgtctaggcagggtactgaatattggagaatgaagattgaataaaaaattctttttttttctgaatgtttaacacttattctatctcctgaattgctacagctccagactatgaattttggctgttactgttcttggcaacttcaggatatagagaaaaaacttattggccaaggaatatgtgtctctataagcatgaaaaaaagtgaagaaatccctgctaacaataagttaacttgcagatatttattttactcagtaggaagaaggccatagatagacagcagaggccaattctttggggtgccatcaaggatcaaggcagctctgccatcttttatccctggcttttatgtcacacatttataagatggcttctaaagttccagctcttgtatccacagttaatccaggaaaaagagaaaaaagcaaatagatgaaggagcagtatggctgattttgtccttttaaaggtttttccagaatctcaaatcagcaatttgtgcttacaactcaaaagccaaaactgagtcatatgatttcccgctttcttgtaagagagtatgaaatgatgagtgtttcgacttctttgcctctgcaagcagagaaaattaataatagtccatccccttggctatccagcatccatgacatcaataaaggtgacatgcatacatacattttaggtggcatgcattaattctttcccaaaaagaacccacctcaaagctgtgattgcatctggtgactcggttatctccaacaggcccatggctcctcctcatagctcagcaagtcatacctttaaaagagaagttatctgtctgaattcccgcaatgtagaatgacatagaaacaacaggatacatgcacttaaaggaaaatgactatttaggaaaggagaaaatgggaagcaagcctaaattattgatctcaaatacatatcaaatcctgctaggtggaaatagaattcttgagttgtcagtgcaataagttccttggttatccaatcacataacccctgattctgtcatccagagggatcttacttgccccttattctctgtggcctcattgaggcctcgctggagaactgcacagctttggaggcttttcctggatatatttagaaacactagaatgggtctacatattaaacagtcatgaattattaccagccagtccttgagtaatctcaggcttaacagacatctttcttatttgctttctgtcgattccaaatatgagtaaacacagtatatcttattctagaggaaatgtccgcagaaaagaagtcactccctctcagggccttcagataagacttcatcaggtgtactaccagactgccattacagttcccaaaggtgattcatttccagtgggatttgtagagtaaatctcagttaagcaatcacaaaagagactaagtgtcccagaggatgtcaagtagcttgaaaggcataatgtaaaaatattatatctaccatggcagaaaaccagattgagaccagaggaaaggacttcacttataaatcaatgaccttgacagtagttgtcttcgaaaaaaaaataaaaaaaaccagtggattttttacttgacatataaaaagatgaaaagtcaaaatcaaggaatatacaaaagaaaatattttaaattcaaacacacatacacacacacacacacacaatgaatttacaaaatatatcaccacagtgaagccatatcagttatattccagtagaagacttttagttaattaaggaagggtgtataatttacaagaaaaaaccaaacaacctcataaaaaaagtgggtgaaggatatgaacagacacttctcaaaagaagacttttatgcagccaacagacacatgaaaaaatgctcattatcactggccatcagagaaatgcaaatcaaaaccacagtgagataccatctcacaccagttagaatggcaattattaaaaagtcaggaaacaacaggtgctggagaggatgtggagaaataggaactcttttacactgttggtgagactgtaaactagttcaaccattgtggcagacagtgtggtgattcctcaaggatctagaaatagaaataccatttgacccagtgatcccattactgggtatatacccaaaggattataaatcatgctgctatgaagacacatgcacacatatctttattgcggcactattcataatagcaaagacttggaaccaacccaaatgtccatcgatgatagactggattaagaaaatatggcacatatacaccatggaatactatgcagccataaaaaaggatgagttcatgtcctttgtagggacatggatgaagctggaaaccatcattctcagcaaactatcgcaaggacaaaaaaccaaacaccgcatgttctcactcataggtgggaattgaacaatgagaacacttggacacaggaaggggaacatcacacactggggcctgtcatgggattgggggaggggggaggggggagggaaagcattaggatatatagctaatgtaaatgacgagttaatgggtgcaacacacgaacatggcacatgtatacatatgtaacaaacctgcacgttgtgcacatgtaccctagaacttaaagtataataaaaaaaggaagggtgtattcaatagaatattctagaccattttaccaaagtgcaactattggcctcataatgtggcttgtctaccaaagctactcttctgaatgcacaggtatatgacaggcattgtcagccacactcctgtagtataagatcgtattagtagtttttgtttttatcattcctaggtaaagcagaagaaacaggctatttgctatttattggtcactacagtgggatggagcctcctggtaaacatagaggcttctcaagggctccctatgtaggaaggaaagaggcattgttccagggtaacttgagcaggcgattcgagagttgtttcctgagactgggtgggaaacaatcaatactttatatagtgatggacaagggctatctggggatgctaatgttcctagaataatgtccatgtctttttgtttgtttgttttgcaataagatcaaaggatcagaaatccctatatgctatcatttgtttgtatcccatttttcccccatggggacaagggctgtaggctcaaactgaagcaggaatctctcattctcctactttcgcaacacatttatgttgaacacctgctatccacaaggattgttctacatgctacagacatagcactgagccaaacaaagtttcatgaagttcacatagggtattacaaaaagtaactgttatacaaagagatataatttattagattgtaacaattggtttgaagaaaattaaaaccagttacagttacaaaataggagatggagatggtggttaaataggatatggagatggtagtattttaggtacaatggtcaggaaaagcctttctaatcacgtgacatttgaacatgtatctaaaagaaatgagaggagaaaactatacttatatttaagcaatagttatgaaaaatttctatagtaatttaaaatagaccagactctttagtgagatagcatctttgggttttattattgtctatatcctgcatcttcataacaatagaagagttgcataaactaccatcatttccccccttttttgtgggagttgtctggtttcaagtcatcctaatattgcactgtttggaatttttttttcatgtgagtcaaattctaattgatcagtaaatttttatttcaacacttaccttcttcaaatcgtgttgttctattgttgtaccagtgggtgtaagaatatgacaagacaccttcctctacagttgtggaatgcactttaaataactgtgattccaaagaaaatcattctgatgttgcttttaacatagttcattactcttgaatgactgatgcaatgtaatgtaaaccttgctctatctcatttcctaaaatgaatatttgtatcatttgctcctgtgggatacatcttcaacagacagatctctctaaaaatatataagtattatttttctcatgattgaaaattttaaaattttctgtaaaagaaatacttactggctggtcttttacatgtctataaaatatttgtgaatatctgctttgttggctatgtcaatttggctcagtttttttcctgatccaaatgctgaatgcagggattcaaaactcaatattgaaattgtcagggttgatcttaatcctattcattaattatttgaagtttttgaagcagactcatctaaagttaaatatttgtattagcttatatcgaatgatttccataatctgcctgtgggtactaccctctgcttttgcaaggactctactatgtcatcttaagtgaaacagtgcatatgtatactagtaaaattctctgctttcctagcattggacaaaaacaaaaatcaacaaaagaattgcctcagtgtcttaaactgggatccctactagttgactaggcacttagttactgaaggatatgtgtggaattcaagttcttttcaacctataagaaatatcggccaggtgcagtggctcacgcctgtaatcccagcactttgggaggccgaggcaggaggatcacaaggtcaggatttcaagaccagcctggccaacatagtgaaatcctgtctctactaaaaatacaaaaaaattagctgggcgtggtggtggggacctgtaatcccagctactcgggaggctgaggcaggagaatcacttcaacccgggaggtggaggttgcagtgaaccaagatcgcaccattgcactccagcctgggcgacagtgtaagagtcagtctaaaaaaaaaaaaaaaaaagaaaagaaagaaagaaaagaaacatcaacactttcaaactttcatcctgcctctttgaagagaatgtgtccacaagctgatctgagtcaattactcatttctggatgtactgttgagaaaaccaaataatgaatagtcttcattcatggctttaataatttgttcttaaagttgaaaggaaaaggtattttctctaaacaccattgttgtccatggggtgtgcctaactaaaagtactgctttgtcccacgtagattctgatcccactgaaaaagacaaagaagtatgtcaaaataagaaaactattggttgtatgactgctggtgttacattaggaaaatgtgacttaggtttgtgaggaaaatgaatctttcaatagcgaatgtcaaaatttggtttagccattcagtcacagggagtgccggacaaccatgtgtctccccacccatggatgagatctttacttcttatgatactaggaggaaatagtgaatgtgctctctattggcagttagatcccaaggacaagggagagagcaatgagccacgcttgctgagctcttgctctcaaactcacaagaccggtgagttattatttctcccatttggaagtattatgtaagtggacaagtaagagaaggaccaggagtgttacaccactatctttccataagaaagtagaagcaatggaagctttcctggacccaactatgtaaccaactataattggctttcctgctttcctggccccaacttttaaccaactataattgctttctgcattttatttttatactgtactctaaaaatgattggatgaattggaatggtggaattatataatatatgaattatgctaaatggttgaacattttaacactgagaaaactacagactaccgaggttcacggtccaccttctgtttctgtgtaatttacttctggtgtgctctgagatgctcttcaagtcctttaactatatctattctgcaaaaaggcaaggagacagacaaacggatgcagggaataaaggagattatttcttgaacatcagccttaatgctggtgaataggttaagtgcttttataattattatctcatttaattcttactagggtccttggaggtaggtattattattccaattgtacaggtgaaaaaataggagatgtcccacattcactaagatagtcaagtggtcttgaacccaagcctttctggttccaaagccttattctttccaaggagatcataagtctgttaatgctgttttctagtctcttcagcggagcttggcttttgaatttctgaaacggaataacagactggataaaattattaaatcagtgaactgcagaatctattagagtccctgatatacatagtggggcttcatgaatctttgtggaattaatgaatatgggaatgaacaaatgaataatcagtactggttatattttaatggttttcaattctgataaatttttgtgacctcaaactgaattttgcacagaaatagtcctttaattcactatcctaatgaattattcagaacctaattcctgagctcacaaacaatggttcaatttaatccttctaactattgactggtggaatgggacaagatggacatctttgtttcttcagaaaatagatgacaagaatttggaaatgaagaccaataactcttatattttagaagtcttaaagaaattgggtatacacttgcatatatttacatgtgtatgcacacatatacattcccaaaatacatgtttttttaaagatgtttaattatcacaggtagctataatttttccatggaataacacaataactaaaacatgtttgatagttcctcagcacatctgacttttattgaaagtgaaacctaaagataagtaataaacaaacttgaatgataggcctctgtgatctctggttttgtgtgcatgctatatttattacactatgatgtgtatcacttggacacttgtgagagctgttcacaaatgcatacagtggacacacaaaaacaaaacagaaatgtgagtgttgtgaaaaagaaggcagcatactcagtttaatcctcttttcccaccgtgtccaggacacactttttaactgctatttgaatgacttaaccacaccgtgaaacttagagtctgctggctaaatcagtgggagttgacattccaacatctgtaagcacattaactccttcttcatatctaagaagtattccaaacttaagagaatattcaactttagaaaatggtaaaattcaaaacaaaaccagactttttttccctattgaaatggatttttttttcacttttctgtgaaaggacattagcaatatcatacctttctataaaggaaataaagttttaaatgacgcaatattaagagctcattttttcatactcatgaattacttttagcctaaggatccatttggaaattatattcacatatcaaagataaactgtcttccctggtgttcatatttaaggtaactgaacaaagttgcttgatgagaccagcacaaaatgaattttactcttttctgattcaaaggtaaatttcttgtaagatgatagacattactgaaatcatcaccgttaaaaaatataaatcacactccatgagaagaatgacatattacttgtggacgaacacttaccagtgtattgttagatatctggtttcggaaatatccatagttagacattaatgtaagaaatgtcactaccttataaagacacaatatcaaacaaagttaagtttattggataccagaatgcagcacacagaagtctgtgttttaaattcccagaaaatattgatttgctaatgtaacatcattaaaactgtgtacccagcttctggctttatatattcccgaggaagccactcccaatttccccatgaaatatgcaaaaatacagtaaagaatgatcaacaactacccttgaaagaccaaggttaataggcaacggatttccagaaagactcaaggattttataattactgagacaatcttagagcaaaattgagattcttaatatctctttagtctatacttaattattttatacaaaagtcctgtttttcttattctctctcccttacttaacttctagaagataagattacacacaaacacacaaacaaatacatatcaaccatatcatattgtcaaatataggcatctgatattgcattcattcctgctgagtatgattcatttgaggaggtgccttcatcatcttttttatttttctcttcttctgtctccccacctccgtctaagagccatcagatcagagtctctaagagcacaatctgagaatgtgtattttaaaaacatttctcctataatacctaatgcttaactgtattttttataaacttagatttttttttaaaaggaacaaaaacctacaaggaggaagccagcttcagtgcaaattcagtagggcaaaatgaagaaacattaagctaaggagcaaagagaactaagtgaagtgaagtattagaaagaataaaaattgtgcagtaacagaactaaattccatattggtgatagtcggggcagaattgacaccacagaaaatcaaattaatgtcttaaagaactgattaaagaagctttcccagtatgcaggaaaataaaggtcaaattatcaaaagaatgagagaaaacatggcaagcatggtgggcagagagtggagattttttttttttttggtaaagctactatttgataacataatagggtatctgtagccaataataactttattatacattttaaaataaagaatataattagattgtttgtaacttgaagcgtaaatgcttgaggggatggataccccattctccatgatgtgcttatttcacactgcatgcctgtatcacagtatctcatgttctctgtaaatatataatcctactatgcacccacataaactttaaaaaaaaaagataaatctaaaaaaagaaaatagaaaaaaaagtgagtggcggtctaacataacagtgagtacatcatccagaagaagaaataagaatagctgaaacagaagcaataagcagatacataaactaaagacatctttccagagatgacatatcctttcatggagattgaaaggactgaccacattccaatcaacatgaaaagacacacgtccacaggtgtgtaggcttattagaaacgtaactaaatttaaaaataaaaatgtacaaacattcatgtagcagggaggcttggttaactaaaaaggaacaaaacctagctcttcgtatatattcaatatagggttaaaactcagaaaaggatagaataatgattgctgattatggaagatatgatcacagaattgtatactcagacttctgcgtgaagcacagaaagactctccatttgaagtgcaaaaactgatcttaatccataaagtattcacccaaatcaggaaatatactaaaagacaaatatagtaaacaaaaaaagatgtaagcatacaagtcacatatgaaaatccacattataaatcatcataaatattactagtagtaaaataaatgtaaataaaaaaccaagatactatttttactatcaaatgtacactagttaaaacaaatagagtaatgatattttgataaagttacgaattgttgtggaaatgtgaattggtttgacttttctgaaaattatttttagtgtttgagctgttaatttccttctagaaacccaccttaaaatcaaaggtgcagaatgccaatatttgcacgtttgtcccttcaaacctcatgctgaaattcgatccccgtgttggagctggggcctagttggaggtgtttgggtcataaaggtagatccctcatgaatggcttggtgctctcctaacagtaataaatgagatcttgctctattagttcccacaaaagttggctattaaaaaaagcctgccactttgaccttctctcttgccgtgttatctttgcacagtctggcttccctttgctttctgtcttgagtggaggcaacctgaggatctcaccagatgcccagtcttccagccagcagggtcattagctaaataagcctcttttttaaaaatataagttatgcagcctcacgtatttcttttaagcaacacaaaactgactaagacacagatcacactcagttgtagcatgagttgtaaatggtaaaaatttgagcaacataaagtagccaaaaataatcctgctcgacaaagtctctgcagtgtagtagcttgaaaattatggcaaagccatcaactgctgccacttaaatagcattttttgaaagcatattcaatcttagggaaaaatggtcatagtaaaagtcatactaaaattctgtaggtagggaagtggggtcatttttttcttcaataatcatatctgtgttttccacctctctagaatgaacattggtcactatgtaatgtaaaaatgacaatatcataataaaaaagataataaatgtgatctataaaaagttacctagctgattattcagaaaccaaacctgtcacatagcatgtactggttaatggattgtcagagcatgaacagtgatggaaccctgttgatcaaatgctgaggcaaatcagcctctttaattaggtactgattgtgacaattgagttcatcctaataaaatagcataacatacaatatatatttattacttattttacataataaagatgtataaatatataagtacatataaatatatgaaaattatttacacaatgctatgtttcttgagcacatattatttaggaaatgtaattgtgatgtttgctaataaccatcacagaaactatgaaattcatataattctttatgctgaatctaagtaataaaagtgtatatgtcatcttcgaaattatgaaattggggggccctcctactctatttagtaagctgttaggttctaaaggatgtctaagataatgaataacattacttataaaggtttgaaacttttcaaatggtctccatatagagacagacttttgggctggaagagagcataaagaaatactcagtatgatgaagtgatatgccaaggtcaaatgatgaacactatgcattctaaaaattaaaggacttgtgtttgccttaataaaatattgccaataatcctcgagtattaaaaaacagactaccctcctattttactgttctaatgtttcactgtgcaaataatttctaattgtaaacaaagttgtcacactatcttgcacattaaataaaccattaattagaatactgtgagggacaaaatgctctggtcacttaagtatttaattcagactctcagtcttttttgtttgatgatgtactttttaatttatgccttgaagtcaccaagataaaacagaagaggagacagtggtgacatttgcttatgagtgagcataggctgtgaggtcttgagtagagttaagagggaccatatgtattccttccccaccttgggaactctgattagccagaaagcagcatttgtagattagaaatgaagaaaatgacaattgtcattcatttggacacagtctgatctctaaataaatcccttaatgctgtgtgggagtttcctggtgattagttctgtttcatactcctcttgctgcgggcaactgagtcctccaaattttaatagagttttgccagcataattgcacggtacactgacacaagttagtttttcttttttacacattttccttcacttgaactttctggccattttccacatgcatttgacagaagaattacaaatatagagtgttattatatcttagatggaggaaatggtccatggacccatgtctgaaacgttcagtcttggcaatcaaggctctcacctcagcatttgctgggacacaggaaaccagctaatggctgataacgtccaggaaattagtaacttgtgcatatggtaaatgctccaatcccagccaaatgatttgtttaactgatggctggagttctcatagggactgttagcacagtggaatagttgggttttattaactggactatgtgctaatccttgttgttccctagttgaagaatgtaaccataatgcaaaatacaatgggaaattgtatatccagaaagtaaagatgttaaaggcaccaacattctatactccaaaagaactgattttttttgcgtcaacattattagtatcacaattttcttacaactattatcttagttcagaattctataaaatgaattatgcatacctttttgttatggtaaagacattaaatacaatgtcactttgcttaacatcttattcctatctgttaattttgttagggacagtgatgattataacctattgcttgcattcattgattttctacagagtatccagatatcaggacagccttgtgctttcacatgttgtctccctcaggcccaaggtcaagtggcagttccttgggaaaatcttactgacacccaattctaggtcacgttcccctttttatctgttctcatagaaccttcttcattatcatagggtttatgtgacaatttgtaatttaaattttgtacgggagactattggattactgttgcttttccagactagagtataaaatataaatgcaaagatcataactgttaccactcccactgtatatcttctgaaccaaccacagtgcctatccagcaagtagcaagtaataatacttgttgaatgaaataactccatgtggtagtcgttaatgtcccagttttacaaatgaaataattaaagctcaaagagcctaatttattaaaatcatacagccaactggatgtcaatatcctatctcatgtctaactccaaaaccattaatgtattagagctctttctttttaattgagtaggacaaagaaagaaagtactgcaaaattcatatttccttttataacaaggttgaaaccttatctgtgcaatcttttagaacactggttctcaactagaggcattttgcccaccatagaggacatttggcaatgtttggagacatttgtggttctcttgactgagaggaaaattaatattggcatccactgacactatatgatgcatgccagagcccctccacacttcattggtcagttcagctacctccctcttttgtttcctttctttctagcttcctttattgattcattcagcataaagcatatgcatagactgcttagtgtatagaaaaccaataacaagtaagatacaattccagacctgaggaaacttatggtttataggaaagtgcagataagtaagtaggtaattattacccatggtaaagagctacctagaggtgtacattcaactggccactatgttaatactgaagctaacacctgaaccactgctttagagccctggttctcaactacaatatctataaacatttgtagtggtcacaattagggcacaagttgctttagagccctggttctcaactgcaacatctataaacatttatggtggtcacaactagggcacaagttgctactggcatctgttcggtgggtagaagccaggatgctgctaatcatactgcaatgcattaaatagtgtctcatttttgctacaataaagaattattcggtctaaaatatcaataatgtcaaggttgagaaacgctattttggaataataaaaccagatcattgtggttttgccattgcattttaaaaaatcaatcttaattttcttgctctccataattattttttacatattgtaactagcaatataattgtgagtgtataatatttcatcttataagtgacaagaaactatatgattacttattggaaacaccatttttaatatctttaatgacatgtcatactaacatttgtagtttattgtacctcctttcttttaaacttctatcatagtccaaccttaagcctttgtgacacttctattttttaagtttagtccttggatgctattccttttggaggcagaatccaggcctggtgcctcatcatccttcctatagagttctgcacatggtgggctctcggatttttattgaatgtctcaaagcaagttaattctccttcagaggctaggcaactaaatgtcgtgggaaagaagaatccaactgactaaaatagatatcatgctacagtacctgcaaatgagctcagatattaaatttttgatcactaaaaattccttcaattagagttggaaaccatatatgattatgcttctggataatttgcaatggatgttcaatttttctttcaggaaacagctctgttcctttagtttttaatatctatcactcagtagatcttagcagttagtgatcattagttttcctccagggatagactactagaagagtggaaatttggttggcatttgtctaccagcatatctttttaatggggttagagcatgatagcaattaaaccttaggtgctttgagatatcttttggcatattggatatgttgacatcctcctccaaaataaagcaaaaataaatcttataatgactttcttttctttattcatacactacaactttctcatagcttgttttgtaacttgcattgaatattatggttccattccttctttgtatatttcaagcataatatttatattctccttatatttttgtaaattgtttatcctcctttgcttttcctcctttgaaatacaatctgaaaacaagttatggattaaaggaagccactgtgcagactaaaaattcttaaactgaagaaaaaatgaaacattttacgattgtttaggtattataggcattgactggctagtaaaaaggtcaatgcaccagcagaaggttgtatacgctgttaacaaaggcaattcctcatgaaatgttgtacatttcaatatatagaatcatattgaataatactatggaaattcctttgagttttccagaattttaaatgaagtaaatttatacgctttctatgttgctcttaatatcgatgatcccagattattgtgtagattagggaaccacctacatactttctgtacttcatggtagatcctggtagaaaaagaaatgaggttgagagtgaatgcagatagcaagggttatccaaaagaatatagaaaaagtagaaatggaagataatgtaatattatttcataagttgatgaacttgtgaggataaaaatgaatttcagttatgcttgactttggcagttcagattctacaaggcggggaacagtacagctttgggacccttttttaatattctccctaagttgactttagtgggtggatttagtataccatgtcaagaatgctagtactgatgatttgtgtccttttgtactaatgttgctaacatgttcattgcacttccaagaagatcgtcacaactatttagaacctggtcagatatagcagtttgaccttagtatgtggttttcttgcattttcccctctttctggctttgttaagacatgaaacaaggtagtttttttttttttttctaactccttggaagtgtatatatatcttatgagttataccatcctagctttggtgaaactcacagtttacagtttgacctttcttagtaagtaggagttttgctgaatcatactccagtactgtgaggttgcagattgtctattccttaagtctttaggttgcttaatgataaattaaataggggatggctgtcttttctcactcctagattttattcaccacacactcagtggtgtaataacaatcccttcgcattgtcatatgattgatgtttaaagaccctattatttggaacctgattcccatcaaggtttatgcaaatatttatggatcactacttggcttacaggatgctagacattctgacatggtcacttgtataccaaaagattttactgacaaacatttcaagtgtgtttgacttattttgaacatcaacataaaatttactggatcccagaggatttcaataacaaatagaatttggaatcagagctggagttggacacattttgctcatgtcattagaatcttcctcagacttctcagactctctttgtataaagcatccatgagaagctgtcatgtctaatttcttataataagtagggtcaatttcatgagcagaacatatgactgtattttatatatgcaatataaaatcacaaccagacataagtggacatgggaaaaaaaacagcaaccagattaaacattcacagctgtttctgagtttttctgtattgttcctttactatttgtttattcattcttttatcttctagtgctcacttgcagacaaatgttgcccatgccaatgtttcagaaaatacatgagataaaacatagaaaaaattctatccatcaatgtgctatttttttctttgaattgaaaatttttccattgtattaatttagagtgaaatttttctcatgtaaagcattctataatatgcaatacaaacaacaggcaaactatgccagataaattaataaataaaataatctgacagagaaaaaagtactgtttgcttcacagtttcactaaacctaaatattctattaaagtcagtgtatggagtatgctggaaaatggcaaacattctgtgtgggtttcagaattgctgtattgggtacattttaaatatttggttatcatgtcaagttattacacattttagatatttatgattattgagatttcaataataagctattaaatattttatttaaagttccattctattttttgttgccttagtcccattgggctgttatagtaaaatgccatagactaggtagcttataaacaacagaaatttatttctcagagttttggaggctgggaagtccaagatcaaggtgctgacagattcagtgtctgttgagggcctggttcctgtctcaaatggagccttccagctgtgtcctcacactgtggaaggggcaaacaagttctgtgcctattttataaggatattattcccatatatgagggttctgcctttatgatctaatgattcccaaaaggccccaccacccaatatcatcatttttggagttactatttcaaaataagcattttggggggatgcaacattcagaccatagcagctgtacaattggcaaaaggattgcctgtttttaaatctctgaatttgattttttttcccaaatacctttactagaaagaaaatttaaacattttacatttttactttacatggagaaaattcatgtcttgctctgttgtaagtttcatattattctctgtttaaagttcccaatcagaacatattacaacaaaatctaaccaattaattaattgttttcactatcttgatcataaattttgtatattcctttacaatattaattctttgctgctagtcttaagaaaaaaataagctttgtggaaaaagataggtatatgcatattttgtgtatattttgcctttactatagaatttatgaaacatacacaaaagcagagaaaatagtgtaatttacatggtacgagaaatctcaacatgcccatcatccagcttcaacatttattctactatgaatcttatttcatccaactattttaccactttctcactcttcaagaatacattatattattttataatatttatagataaaataatatgtctgtctatatcccagacatcatattatttcacctatatatattttaccatttgcctctaccagccaagaattggtatgtattcatcatccagattgaggtatttttttaaagcagcattaacttttgtggaagtatcgtaataagacggaatattctgagttaaaatcaaacaaatctttccaattaaataattgagaattagctagaaaaatgacttaaaacttagtgtaataaagctagtagaatattaaagataaggcataacacatttcttcttacattcttagtttcattgtgatataaggattagttatatgctgcttaaagtcaagattatacaattacacagaaaatgttccaagctaatcccttggggttgattttggctgatagtctattatttagatgaccaaagatgacagaatatacttcttaatttacatgaattactcatctaagttttatacatagtttaacacatgctgcatgcatgtattaaactgcatgaacgagctgagatgagagaagaatatagtcaaggtaaaaatgaggagctagatacattcaccaaaactgcttagggaaagtatagcttaatttaccctttaactagaatagctgagagggcaagagatccaaatagtccctgagtgaatgcagaaactgaatgtgcttaatggcatatttttgtgtgtaaatacgtctctcttctgtgctccttgtttgcattagggagaatagtagggggaggcagaagtcttctcttatgttaatagaaagtgtggtttatgtattccttataaatttcattcatattctttatgggcagcattcactgcagaatgttggatgagtggagtgcttacttctcactatctgaatgttgtagaactagttatttttatttccaaactgttgtggactgatgcttttataaaatataataaaaataaattaccagaaaaataaaataaaggaaaacaaagatatagacataaaactcatctatcaaatgaatataaaagtttctaaatgcttactctgcatttctgtccctgtttcttctgagacaggttaacgaacactttaagtgaagatgacacttaatgtagtactggtccagactgttgatccatatgtagaggtgacaactgcagtattggactggcagtatggcactgtcaatgaccaggaagcacagacctcaatgaaagaactgatgaaagggtcctgggtgccctcttatctatcctaggttttaactggattgtacagtgattctgggcatcctaagggaggagtcaggtgaatgaggcagtccagaagacacttggtagggggagggttcagtcagcagctgttttccaacaggtatgggtggaagtatttcactatgtaaacaaccagcataaccatacacaaataatactagtgcctatcagtggagaatctgtactgctgtcatctctacatttatagatactggagaacagggagcctcttgttgcctctgtgcctggcaaaaggcctgatacatggtagatgctgagtaaatatttgttgagttgatgggtgactgattgaaagaggtttgtagaaggaattcttcccttttaaaatttgtattaaactgtgataattcagacactcaaataaggtgtgtatatgtcagtgtcaggatgtgcagagcttcctttctaatcagatgcaaggggattcgtgcacaaaaagggaaacagattattattgaacccatgtccaagtcaaagaattattaatatacatttgctttgaggtgcacgtagagcttttctgttcatttgacctaatcctatttgcatgtatgctgctaaaacatttcagccttttctcataagtagaaacattaattttaaaaatcaattttactttgaattaaagcctattctaaaataagttccctttaaatctttattctaaatattttagatgacttattttttatttgaggacaaatatccagggagatatggggtattaactgatgaaagatgatacaagataaatgtggaccctgtcgtgaatacaggtacactctagaatgaatatgacagattaatgtacaaacatcagctagaaacagtagcaaactaatgtaaggctaaatacctacaagaaataaattttatgcagtagtcaccataatttgtcatgttctttctcaagtccaggcctatggataagactgactctcaccaccctctgttacccaccttgatgaagtaacacaaagtcatttttcagatgtctgtgtagatgccacttcttgcaggaccattttgagggacagtgcctccacccatattcacttatcgccccttctttgagccttccttgatcctttctagcttcttgtaattagcctgtcaaaggccttaaagcatttttgcattgactctttccttctgatctctcccacactgttagcctcataactgctatgcaggaactgaaataatagataccaacagaaagatacatagtagattgtggatctgttaatgagccttcaaaaaactgaatggtcttatttaattcctagaaaacactcgctggtctcattcttgctgaccccagctgtgaatagagcatgacaccatatttttgaaggagaagtacttctgtaagagagtcatgcattctggtataattttacacatatatttttaaaatgacacaagcattaatgtatctacacacatattttctaccacagatccctgacctttctgcctttccttaagggaaaaaaaaaatcatccttcttcttatacagttaatgggatttgtcaagtctttggtgcagacatgtcttatttcctgagtaatgagatacttccatttgtggtagggcatcttgttctgccccaaatgagatatgccaagccaaacatgaattagaatgctgaacattatgtcttgtgtgtttgtcaggtgtgtgatctatttctgaaaacccaaatgcagttcaatgacatattttactatttgtgaactttaccttctgttaatatgattgaagcaactggaaatggaaattgtcagggcaatttaacaaagaagccctgtaaaacttattaaagtccaggtagtaaaaatccgtttagaaggcatattcttcaaacctgagttttatttggtaaaacacgttggtgcctgacctttccagaaacataccaaaaaggagtcatttagaggtccctgttgtaaattgtaaacagcagcctgatcaaattcggctgtattctgctcacagtatatgacagaatgtatgagtacaccaaacagacagctaaatgactgggtatttggatgagtttgatgtgtattttatgtaattgcatactgtacaaagcaataaaaagtcaatcttgtatgccagaaaaaaatgcaggtattgagtgagtcaaagaatcttcataagttcgtaattcaagttaatctttcaatggataaagccagagggcaggagctccgtattcatagacaattttaaaaattctgtagtcaaggtttcagggtagaagaccagaattgttgcacattttgtatattaaaacatatttttaggaaatacatttccaatgttaaaaaaaaactaaaagtttttagagtgtgaaatacaaagttaaacttcattcctcatccatctccagaggtgatcaatgttatcaggtctcatatgtggatccagacactttctgtatttatccaaacacaaatgtatcctccccaatgtacatatattaatggtagtacagtataacggttatgaatgcaaggcctacagtctaattcctgggtctcacccaccggctgtgtgatcttaagtatgttactgaacctcccaactcctcaatttttttgtttgtaatgaagaaaattataatatctatgtcatagggttgctgtgagaatctagcttagaagagcaccgactttactgaagaagtattcgaccaaagttaactattgattgttattatgaataacaacataatattcatttaaatcaagagaataagcatatatatgtaaatagtgattgcacatatatatattttcatatttatacaaatgtatacctgtagatactggtctgcaacttgccttttgacatatatcttggacatgttgtcatgctactatatataaaggtttatttgtaatcactatacagaatcttagtttatagatatgtcataatttaattatgagccctgtattaatgaatatcaatttttcccaatcctctgcttcatgtgaaatgttttagtagcatctttgtttgtacatgactgtgcttttataaaactgtatgtgtaggataaatgcatagaggtgggtctaagggaatatgcctttacattattggtggttaatgacaaacattctacaaaatttgtgctaagtttttcttctaccaccaagatgaaaaagtagccatgtaagggagatgttttgagaactgctcctttaaggccctttttagaataaatggttatgaatgaagcaccaagatagaagaggccactatggagtttatgaaatcaggcttaattagtaacacatgattgcttttgcctttttggccagtagtcacacatcataaaccaaagcttcagtggagaattatattccaaacatacaacttcattaaagtcggaaagaaatattacaaatgacaattttcacaaccttaatatgctattttaaaattgcataggtatcatattagtcttataattattgtaattaatttttaaggacatgaaataaggaatttggatcaagcttagcttatttcatgttcttctctatctgccttgccttattagcaccagggctgcattcgtgtgtgtatgacagagctccatgctcagtagggtcccacacatgaacaatgcttcattgttttcatcttgaaatacttaataatttttttaatgtaataatactgcaatgaacatgagagtgcatctttaacatactgatttcatttcctttggatatatacccagtggtgagattgccggatcatatgttagttctgtttttaattttttgaggaatctccatactattttccataatggctgtcctaattgacattctccctaaccatgtgcaggtgttcttttttctgcacatcctctccaacacttgttatcgctcatctttttgatgacatgatcatcacatgaatgctttttgatggaccctcatgttcattttgcaatgggtcacacaattttcctatagccagtcctgatgagcaataattacatttcctactaattagcctggctcagttgaaacacagaatatttgtttgtcttttgagaaatgccttgtggttgtgctcatactttatgataaaatagcattatttaaaatatatggaatatcagcaaaggagtgtcactcaatccaaaatatataagaagctcaaacaactcaatagtaagaaaataaataatcaattgaaaaatgggaaaaggacctgaataggcatttctcaaaagaagacacataaatggccaacaggtatattaaaaaaatgctcaacatcactaatcaccagagaagtgaaaattaaaatcataatgtgatatcacctcatacctgtcagaatggctattctgcaagttttggagagaatgtgaagaaaaaagaaccctgtacactactggtagaaaagtaaattagtacaatctttatggaaaacattataaagattttttgaaaaattaaaaattgaactaccatgtgatccagcaatcccgctgctgagtatatatctaaaggaaataaaatcagtatgtgaaagagataactgctcatgttcgttgcagcattattcccaatagccaagatacagaatcaacctaaatgttcatcaatggatgaatggataaagaaaatgcagtgtatatacacagtggaatactattcagccttaaaaaagaaaggaatcttgtaatttgcaacatggatgaacctggaggacaatacattaagtgaaataagccaggcacagaaaaacaaatactgcatgatctcacttatatgtggaatcagaaaaagcataagagcagagagtagaatgatggtcgcaaaaggctgaaggagggtggacaggaattagaaaggcggtggtcaaagaacgcaaaattttattgacaagagaaataagttctagttatctattgtacaacatgatgattattgttaataacaatttattatatacttgaaaattgctggaagagtagatttgaaatgttctcaccacaaaatgataaatatgtgaggcaatgcatatattaattagctttgtttagccattccacaatgtatacatattatgaaacaaaaataaaataaaaatttattaagttgatacaataaatcaatgggagaaggatggactatttagcacgggaacaactggttgaaaactgtagaaaaattaaattaaatttgctaatagccttatctcatatatcagtataaattctagcttgttaaagagataaatataaaataaatatgtgagatctctggaaactatgttttcaaagtgtgtcagtcaaataatacagagctgtgagaaaataattgtggatgagacttgatatagatctattttaaagggatcctattctgtgaaaaatcaaaatgacttgcatttacgtaactgtttactctataagggagtagtagaatatcactatacataaatgagtttattttcccactcaaagtgttaggccaaatgagaagttgctcattttctactgatgatgtatgctttagagatctaattatccaattattccaatttgaaaaacaaaactgaagctcagggaaatgtaatgatttgtgttcagtgacagcacattaatagcagatcttgaacttgaactgagtcagcttcgccaccttctctttcttcaccaggccagattttcctgccacattttgataactggttccagttggaagcaattaccaccataatattccatgactggattctccttcctgctatacaaatcaaaagcaattaaagatctttcaaacaactgtggaagatgagagctgctcatgtcttagaattagaatacttgggttcaggtctcctgtctgtgatcatgaatcttaagactacctctgaacttaactttcctcatattaataggatgttaataaaatctataccataggcattttttccaaaaaatttaatgagattatctatatgaaggacttggactacagttagcacacacacacacacacacacacacataaaatgattgtttaaaacgatcaaaccagaaaaatgatgcttcacataaacaattttttcatatatcataaataaaatacaataaaaagatgtattttaaatcagattttgttgttttaattaattacagcgctttggggtgctgaggtaaaaagactacttgagtccaaaaatttgagatcagcctgggcaacatagctgtggtaaactttagcaacgaatatagagttccataattttgaattccatttcctaagtgacccagagatattcagcagaagatggcaagctcataactaaattcaatttttattttcttgtatcactcatgtaaataaaacatctctcttatgtctttacttttggtttgttttaatgttaagagacataacatgatgagaggaaataaaaattttcaaaatgaggaatagaagttcttgctatgtagactttttaatttagggctaagggaactgaaggaattcagttgagggaaagatagtctgagcaattatagaagccactcgttgacgaccatgttcacatgacagggagacagctcaaggaggaaatgaggggtggttacaggagaaaagtacagaaaatttgagccagttctcctttcctctagttttctgttttaaggctaactttattgaagtctaatttgtgtacaacaaagggcgtttcttaaaaatttacaaattgcccgggcggggtggctcacgcctgtaatcccagcactttgggaggctgaggtgggcagatcacgaggtcaggacctcgagaccatcctggctaacatggcgaaaccccgtctctactaaaaatacaaaaacttagctgggcatggtggcgggtgcctgtaatcccagctactcgggaggctgaggcaggagaatcgcttgaaccggggaggcggaggttgcaatgagctgagatggtgccactgcactccagactgggccacaagagcgaaactctgtctcaaaaacaaacaaacaaacaaacaaaaattacaaatcaatgcatttgtgtacaactgtgagaccaccaccagtcaatatagtggatatttctgtcacccccaaatgattccttgtgcttctttgtagccaattccttcctccctgatgtgctgtagctacagattaggccttgaaccttggagcccaataacacctcttcgcatgtccctcaataaatttacctgctattattccctagggattttgtttttattcagtatattctttacattcctgggaaaataaatagaatatgtttcatcaataatcgtccagctttatttaataattagaatcaattatgtagaggaatcaatgtttatgatttaaaatgttcaatagtaaagccaaaaaacctggttccttattcaaaatccaagctggttgggagaaatatatacaggtggaaaagtcccaggaagatcagtttctaaaaatatgagtcatagctccctgcagtatggtgggagtaaaagtcatttttattttcactgcagtgcataaaggggacatcactaaatgaatgaaaagatggatagatggatgaaaggaggaagggagagaagaccacatcaaagtcacttaacttgtgataattcagaatattcagagactggaagagaaagaatgtctttgtaagactatactgcctgttgggcaggaacacagacttaacgttgacgagcctcaggttttaataccagctccaaaactaaggttgctgaacttcatttttgtgacttgtaaaatgagcaagatgatattgatattgcagacttgacttaatggttaaattaaatcatttgtgttaagaaggtggtacaagaagccagacaaaaaagaacgtacactatgatttcatttatacagctaaaaaactgtcaaaactaagctggggtgatgaaagttggaataggtcctacctttaagtggaggattgttactaggaaggagcatgaggaaggcttctgggttgttgatgttttactgttttatctgaggagtagttcactcacttagtattagctccaatcttgaaactgggatgcctaatctagtctttgctttgccatataggaacctatatacacttacagaaatcccatgatgttccaggcactggcaaggtcctagggatgaaattaaagataagatttgggttttgtgttgttcatttataagactatagtaccttcatttatgaaatgacaggatctggtgaactctaaactcttccagctctaaaattctatggaaaaaatcaatgaatatattcatttcttcttcctacaaatatttattatgatttaaaaactgtgctgtaggtgttgatgatggagtaaacaaggcagagaatgtccctgcgcttatcggacttatatccagggaagtgaagtcatgggagcgtgtatgtatgtgtgtgtgtatatatattcactacttaaatgatacatgctacctttttagataaaagaagtagggaggctacatccatatgttcatgtatgatgctgtaaaaccacctcaaagatatctcttagaaaatacactggttgcttgtttgggtaaaagagatagaagatggggctattcatagactacctcagaacatttatccctatttcaaggatataaatgtattagctatttaggaaattaaataaaaatctaaaaatagcacagagtaggccgggtgcaatggctcaagcctgtaatcctagcactttgggaggcggaggcaggtggaacccctgaggtcaagagttcaagaccagcctggccacaatggtgaaacctcatctctactacatctctaccaaaattacaaaaattagcctggtgtggtggtgggtacctgtaatcccagctacccaggaggctgaggcagaagaatcgcttgaacccaggaggcagaggttagagtgagccgagatcgtaccattgtactacagccttggcaacagagcaaaaactctatctcaaaaaaagaaagaaaaaaaaaatagcacagagcaaagcccatttctcctccttgtcatttctcaatcagtgtggtcctttgtgggtggggataggtaatggtataatgatgagcctgccttgaagttcttgttccaaaaaatcaactttttgacagaaaaaaaaaggcttttttcccttgtgatccataatattagtaaaaatactttggcttccaggggcgtctatgaggaatgtctgataactcaacaattctttctaaatgccgtaataattttggaaaatacctaccgtgcagcccatagcaactttctggaatgctgctttaatttgcttctctttttccctattccaacaagaacaatgacaacaacaaaaattaacttagagaagcatctgctggaacaagtggtgattatttccaagcccaaacaaaagtaggtagggaaagaattattcagagaaaacatttttcaagatcttctccagtgtgtgagagagtatgtgagaaggaaaatgcacatgtggataaaatgttttcatttgacgtcgaaaatgatagggaagtgagagtctgaaaacggtttcacaatgagaacacatggacacagggaggggaaagggaacaacacacgccagggcctgttgtggggtgaggggagaagggagggaacttagatgaagggtcaataggtgcagcaaaccaccatggcataagtatacctatgtgacaaacctgcatgttctgtacatgtattttatgtaaaaaaaaaaaaaaatgaataaagaaaacagttttagtttaaaaaaagaacaaaaatgcaaacaaagaaaaactcctttaaaatttgtgatgtacttattagaattatggatagctgtaaattgcaaaaatcacaatgataggcatgatagtgtaagcttctttatggtgaggaccctgttgtcaatttcttttgtatctctcttagcatggatataggcatgtagttgggagatctttttaagacaccagatgggcaatgtggcaatagagaaagcagtacatggagaagcaatatgctctctgctgaacttggaataatctcttatctcaccaagcctcagtgtatccatctatacaatgggtacaatgctctgattaacctctgccagttataaaatatgactcacttgattcagttgaacattccaaaatttctgtgctgtgagatttgggaacatggatttttttgctgctggtctatattattaataaaggaaagttttaacttttatacctcctgttaaaaccactattggataggatctagtttatacaccacttacattaagttgtcgagtctggcacgttctaacagtgaagtttttttttttacacgtgaggctgtttgttcttgtcttcctgagtattttcctgttgaatgttttatgctcccaaggaactctggtatgttgaattgtatttattgaaagcttgtaaacccttgatcttagagaataaaaatcggggagcaggagaaaaagcttaaaaatgctttgaatcctgagaaaatatttctgtaagttaaaataagggtgaataatggtgaggatagcttacagttccagaaaacaaatggaaaattttggagatattaaaggcaagaataaatttaataatttttttcttggctagcatgaacttttatattttggattggatcctttaatgcttagattaacatgccatccttatttttattgacatatttgtatgtgccacttacaattctaggatgttacaacaaatttttttatacattccaggttgcatattctatgtaattggctacttttcaatgacttgtttgcacaatttttgagtcttcactttagcccctgatttctctttcatatattgaagtttaagcttatatctcacttctcattgaagtcgccagtaactttaaatcatgactaagagaatcttaggggctacaattacgataaaactcttatgacatgggtcactgttctttaattgaggtggtccacttactgtgtaaatgttttaaaaaatcaattagaataatatttatattatctttatgtacttgattttcatattggcatttaaaagtgtgttttaactaaaattttattttgcaccaattccataagttaactttggcatcctctaaagaaatttcacttacagagaaaaaaaaatgtgtctaattaactttttccttagagttgtttgtttataagtcatcctagaactcattccctggctattttgaaattttttcagcaatctaaatttactagtttagtctttttaaaaacgttatctttttagggaattgaattttacggttttactaataactgaaatactgtgattaaccaattactttattattgtttttaattgtgataaaatatgcataccaattattttaatatctgaacatatctattaagactaagaaatagaatatttcttgtttttaaatgaagtgctctattccatgcccttaagtcatacctaggaaacccatagctcataaaggctgctggaacatgcaggcccatgtcagaattaaaccaatagagggtctctgaaacttgaattttcatcttggtgagtcttctggggttatttattcatgtgttcttgctccaaatgtctgcttcttttttttttttgcttttattgggtgaaagacagcataataattctatgtatttaaatgcaactgatataatacataatggggcagaactttaaactcttatgccctctgaaaacattgtaaaggctggaatgaaaacgtaaatgcaggcactcatgtagttataaaggatgaactttcgaaaattgaaacagtcttctcttcagaaagatgctcagtgatttgtgtgcaagatagggctggaacaagggactcctgactatcagggactctgcagattatttgtagttgtctctctgttgttgatcaaataatgaatgtaaaagatggttgttatatctgtagagagcctcattgtattttgtattaaacctttcaataaaagtgaatagttttacttccattagttggaaaggacaacctataacttatcagaagtctcctgacagcataataccaagttctagaatgaaaataaaatgcctacaaatatttggtttggttaagattaaagatgcctggttcaagcatgctactttgttgtggcagtaaaatgtatgcacaatgccatttaaacaacagaaaaaaaaggatgaaagaaaaaaaaagtttctcaggtaacagaggaaatctgaaaagatatcatatacctgtagaaaaaagaaaaaaacccactttatggaattagctccaatcttcaatttgggatgcctaatctagtcttcgcttttgctgtaggagaatctacatatacttgtggaaaacttatacttcaggcactggcaaggtcctagggatgaaataaaaaataagatttcgcttctgtgttcttcatttataagaccatagtgccttcatttataaaattaaaggatccggtgaactctaaactcttccagctctaaaatttcatggaaaaaaaatcaatgaatatattcatgtattcctcctacaaatatttattataatttagaaactgtgctgtaggtattgattatagagtaaacaaggcataaaatgttcctgcccttatagggcttacatctggggaagtgaagacagagcctgaaaaaatatccaaataaatataatataattttgcattgtaaaaaatttcgtgaagaaaaagaagcacatagggtgatgtgatattcctggaagatctatgtgtattaccagaatacagattggaggacaagctctgttctgagcttgtgttgttgagagtgtgcatgggcaattagtttttataatatgaatctaaatatagtttataaaataaatgcatgaagacattttgagagacagccttacataatatactcatgagaattattcagtaaaataatcttctatcagatgaaatgtacaataaaattggcttgttgaacgtcattgtcctatatagtggtagcatctatgatgtaaaacattgtctaggagaggacctgaatcttaggtgaatagtaagtgccataaaagtaatgccaaacatgaagacacaatgtgtagtgatggagggcacagactgtggagccagactgccccagttcacattccaactctgccactgtggaagcttaggggagtaactttatttccttgtgcctcagtgtgctcatctgtaaaatgggattaaaaagtagtcccggacaggagcggtggctcacagctgtaatcccagttttgggaggccaaggcggttggatcacgaggtcaggagatggagaccatcgtggctaacacggtgaaaccccgtctctactaaaaaatacaaaaaattagccgggtgtggtggcgggcgcctgtagtcccagctactagggaggctgaggaaggagaatggcgtgaactggcaagcttgcagtgagccgagatcgtaccactgcacttcagcctgggagaaagactccctctcaaaaaaaaaaaaaggagtccctatttcatgaagtttctgtgagaattaaaggggattaaattaacttgggggggggggtctaaattattattaatagcgtattttaatctatttaattttaagatggctataatgtaattaaagcactactttaaatatacgccgagtactaggcaatgagtaaacattataaaagtataaaagtcggccgggcgcggtggctcacgcctgtaatcccagcactttgggacgccgaggcaggcggttcacaaggtcagcagatcgagaccatcctggctaacacggtgaaaccccgtctctactaaaaatacaaaaaattagccaggcgtggtggcgggcgcctgtagttccagctactcgggaggttgaggcaggaggatggcgtgaaccagggagatggagcttttgcagtgagccgagatcacaccactgcactccagcctaggcgacagagcaagactgtctcaaaaaaaaaaaaaaaaaggtataaaagtcatttctcttcctcactacttccaacaatgacattttgagttacacaaacaattcatttttaaaagattataattgaaagtgtatgaattgtgctgaagaaactaagtaaacttcagctagaggaaaaaaatcccaaatgcccttcatcatcttactggacaatggaatgctcccttcattatagatatcaatagactaatagataatggaaagataacaatggactatgaatgaagtgtaacattttctcaaacttcccagtggaagcaaaagaatttttaaatatatgtctggcaaattaattttgtggagtatagtttactagaattatggggaaaaaaaagcagactgccagtatggctattattctagctatgtgctaaaatatatgcctataataatgttttaatttaaccctaacatcccaggagttacactgatatcgaacttgaactctaaaaactcatatttgcgaagacttccaacgtatacctcaggttacctgtaaatatgctcttaggcatgtgtacatgagtcccaaggaaacttttgccaaaatgtgtaattgttttatatgagggttttaagaaagcacttttaaattattttaaagtaggattacaaattgaagttattcatgatttaattcccttggctagtaatatggaagtctagctccccaaaactttgaaaaaacaaaaccccctgaaatttataaagcaacagtttttttaaagctttgttgctacaaagtgagactgtgagaatgaaagttaaaggcctttgctattccatccatattcagtttggatatcctcaaagtaattgaaaatttacttttgaatatgctgaaaatcgagtccataagtatctagtagaatagcttttgattggccagattctatctctgactcttactatgctttagaattcttttatgaactctttttctgatcactgggaagaagaaggcagtaagagaaaagagcaatataagaaattgataactccaagggccatagttcgtttatgtttctcatagttatatacgtcttatgttcattttaaaattttaaaacaataaaaggagcacatatatgagcataaataggtataaacatattctttgtttcccaaagaattttcagtatatgatgataccttttgaaggaaaggaatatagaaggttcagtgtatgacgatatcttttgaaggaaaggaatgtatctcttggtcccatcaaattttttcttgacttacaaaattgttgatatagtttgtctctgtgtccccacccaaatctcatcttgaatagtaatccctatgtgttgagggagagacccagtgggaggtgattggaacatgggggtgggttttccatgctgttctcctgacagtgagtgatttctcacaaaatctgatggttgcaaagtgtttggctgttccccactcccaccctctctgtctcctgcctccacataagacatgccttgcttcctttttgccttcacctccccagccctgcagaactgtggttcatttaaaactctttctttataaattacccagtctcaggtagttctctatagtagtgtgaaaatggactaatacaattgactacaaattttttaaaattctccgtactcaagcaagctgtggcattacttaccacagttatttttttatatttctgtggcatttttgtaacagaccacatagaaccaacttagaacaagtgtaagcaaaacctttgatcctgtagaagacaatttgatgcaagaagtcttttcttgccaggcacagtggatcacgcctgtaatcccagaactttgggaggccgaggcaggtggatcacctgaggtcaggagttcgagaccagcccgaccaaagtggtgaaactccatctctactaaaaatacaaaactaactgggctgggtgtggtggtgtgcacctataaacctggctacttgggaggctgagagaggagaatcacttgaacctgggaggtgggggttgcagtgagctgagattgcgccattgcactccagcctgggcaaaaagagtgaaacgccattaaagtaaataaataaataaataaataaataaataaataaataaaaataatcttttcttggtgaagcttctttagagccaccatccatcagctttgacagctttttgtgatctatggccagtaatctctgcttaatctataaagtgtataaactcttccagaacagcaaatgtgctgcccaggggttaggaaggtcaccaaattagttcattgctgagatataagaagacggccatcctggggatatgcacctcctttgaagttactgggaaaagaacagttccagaatatgactcaattactaattttagtggcaaccaacaaaaagccctttaaaaatataacagtgtgtatgtgatgggtgcctatgcttaattacatgagcatttgattataaagaaggaagaatggctctcaggaagctgttttcctgatctggaaacaatgcatcatgtagtaaaatgtaaaacgggcttagcagctctgcactagctgataatttgttctaggacaagtcacttaaactctgcgtttgggagtcattagtaaaatggggagaccaatatttggcctaccccattcttaaaacttagtttgtgattcaaaggagaaagaatgcaaaaaatgataataataacaggagactacaaaaagtcaggaacatctgattgaaagtaaaagcctatgaattttggcaaaacgtgatcaagctctcctaattctggatatcaatattagccattctaacctgtggaagatacaatttaaggataaatattgcagtgtgagtggcaaagtggcaatgagtggcctatatctaaatattaggaaataataatttatccagaatgacctgcaagaaaaatttttggtcagcatatgaatagtattttgctaccatttttgtttggcaatcattgagcaataaaatgggaatatacagatattgtagtggaaacatcaatatgaggagttaaaaaccacaaagcacctgcatatcggcaggatagatataaatgccaatgtttaataaatattacaaagtgtaatatagtaaatagaacaaggacatagtgttgagattcagggccctgaaacaagaagtcctgatatctcagattcattaccaactaaatcactgatgatgttacttaatctttctgtgcctcagtttctttacatgtccaaatgagaacagtaataaaattaagtgagtaagtatatgcaaagtgccaagggcagttcagaatgcaagaaaaaggtggctatcatattatatagaataataaagcctgggttgctaccctcgttctgtcactttttttctctgagtcttagtttccttatctgaaaaatagtaataagaatatctacctctttcattactgtgacggatttaataagatgaagtgacttcagttgcactgtagctctcaggaactatccaaatgttagtttaaaaaaatatttattgcagcaattggcattaaagtgctgacaaggacatctaccacctctccccatggatgaacatctcacctagtataaagtgagtatctctgtctctctctctctctctttctctctctcttctctctctctctgtctctctctctctcttctgcctcgctaactttaaagcagagtttcctaacctcagcactattggcatttgaggctggataaagcctggttgtagggggctgtcttttgcattgtaggatatttagcataacaatccttggcctctacctaataattccagtggtacagcattttccccaccccagtcaggatgtcctaggaggcaaaattgtccccagttgagaaccactactctaaagcattgtttatatgttagcttagatactacttcctccaggaaagcattctgtgaatatcccagaaggaatttaatctctcctatgtgctcctgaatgtacccccttgaaataagtgtttgccttttaataatgtttacatacacatttcctcctatagactgtgagtttatcttggtcaggaattgtgtcctacttaccatctgttttcatgtggtaagcactctatgcatatttgtgaaaagaagagagggagagaaggaggaagagagagaggaagcaagaaagataagtggttaatcagctgatcttgatactgtctaatgctccattatgtatctttcaggtccctctgctgtgtcagatatgagggggtaacttgatttctaaggagccagtgtagagaaaccaccatgtactcccaagcagaggcccagcttctgcaaaagacctggtccattattgtttatatggaaatcaatcctatattgaacagacatattaaattaccggattaaaaacccaataccatcatcagtcagatataaaacagaaactgatactagcccttgttttagaagaatgtggagggagtgatacatctgttatgagagggaactcttgcacaggtcaactgtagttggctaattaatgctcaatataaacatgaaacagagggatgcttcagctataccatgagttcatgattttgtgtaaacaacaatttaaaaaatgggctgaagtccacattgactgtcaatgaaattgaaacatttccctgctagataaagggagggatagaggctttcctcttataaaactggctgtgtcagtgattctctcctcagattaccttttccacctacctctcagaatggacttcagtgggagtaaacttcagaggggccttgtggtttttatagggggctggtacttgccgtatccaactcttatgactacagaaagtttgaatgagtacaccaacgtctcacctgaaaccctcacatttgaagtgtttaaaggatgtgattattgtacttcttatatgcatcattatatatgtaacttttacatgtaccattatatatgtacattattcatgttcatcagtatacgtttcatatgttcatcattatttcatataacacaagaaaagaaaaaacattgtttttacgctgacagcacactgtttcataacttaagatattttcatatagttcctttagatttatttaggtatagatttttaaaaatcttttttgtgtgctcataaaaaggaaagcataagcaaattaaggtaaatcattctaaactgtttttcacaattagaatctaattctaagtgattttttgactgagaattgtcattgtccatgtgttttccctcacacagtgtgctcagctgtgtcatcaagaccatcgttgacacagcattgcttggaaggatgctctaccgatgtctctggggttttcttccaaaccacccattcttgatgttttgaagtgcatatgcaggccatcatgatgacataatgattgtatctggttggtagctgttttaagaagaatcctaatttcagagaccattaaaatgtgaaaaaatgtgcattttagaattgatgaaataagtaatttacatcctaatgatgggactatctactttctactttaaagacttgaaaggattcaaagtgaaaagtgctgagaatccagagccagatggagctaaaatcacatttctctgctatctgcaggctattttaatgagggcaaattatttaactcttctgtgtctcagtttcttcatttgtgaaagctgcctcaaaggaacattggtgatgataaataaaaataaacctctttgccctgagtagttatacaaaaatatattctctttttaaaacaagagctcagttcaaactggcattttctctgtatttgaacattttatatgtaatgttctaagtggagactgctaaaattggtaaaaatgttatgtcttaacaatgaattggttacatttcaagataatgagcagattcagatagcatggtttttaaatacagtttatctaacagggaactcatccatagttgtcttgtgaactattttttctttctcctatcaagaatttgaattttctctaaggccaaatggtgaatcagcagctggtcaataattgattttattttatgtcctataccctttttcagtccaatttttaagtcaatgttaactcagaaactaattcacagcttaaaatacagttgacctgacaaggctgctatctattctagactaacgtgaatttctcagtgtaagcactaatatcttccagtacaaatcttgaaaattaaaaccaaaggattagcgttatcattactgatgttaattctgtattaaattcatagtaggtcacaggaaatcatccctttctcatgttatgaaacagaaaaagataggatgtcagaaactaaaaaccaatatatgtttgtttgtttttttcctagaaggtggctgaaacttagtagccacactctacctttgcagtttttatttttctctttgaattctgttgcttcttccatcttgccagcccttgaagaatctggaaaaagcatctcattttccatggaacaagaaataggttaatagtccctttcacaaaatgtagagtaggactttcattgaatgccaactcagttttgttttttaattctgtcgtacagcatagaaaagctggtgaatgatgtcatagtcactaacagcaactgttcaagttaggagaattttagagaaatggatattgtcattattcattcacaagtgttttattgtgttatagatttctattattccaaataatgagccatctgagaggaagaattggggaccaactcattgtcaatttcccccagtgcctactacagtgcctgctatacataggaaactcagtcaattcttgttgattgccacaaaaattagtaagaattggaaggaaaaaggaagagagagaaaacaagctcactagagaagattcttgaatcctttctgaatcatatcaacacagtatagcaactggcttaatcatagatgtcatcactggcatttatggttagaaatataatgtttaagccccatcccaggcctttgaatccaaatcctcaagagtaagtcttggaaatctatatttataattatcactcttggtgattcttatgttcaagcaaatttttaaaacactggaatactatgatgctttttagaaaatgtttaagttggtcaaacaagtaatgattcattttagaccaagttagcatttgaacatttcagaccaatgggaatattagaatttggtgctgggtagccaatgactgggaagggagttttcttgttttaggattggtttcaaaaccataacttcactcttatttcagagctttctattgcccattattgggcagtagaaaaatattgtttttattctaaactcaggacctaatatcctctaatgcttagcaaaatttgagtattttaagaggtatttagttggtattaagagaagtgactcagaaagtcagaaactttttctctttctcctaattgcattataactatcactgtaaagacaataaataatacaaaacttcttaaataatgtgaatatatgagcacataaaaataagaacattccttgaggctctacttttttacagctttctattacactatgataaatagatgaataataaccttgccaagttatatttgttcttttatttgtctctagacatgtacaattttggtgccatcatttcatctctgactgcttttctgttatcttgagggtctcagtcagataaagcattataaataataaatattcttgagtcatctgatagctcaatcccagaggaaataaggcgttcaaatttccatagaagatttttattaaccttcatataaatataagtataattatttttcaatagttttagaatattattactatcctttagtaagacatgttgacacaccacaggtcaaacaccagaatcccactagaacaaaatttgaccctaaccaaaataatcacacatgtccccgtattgctgatgcttattgattcatttgtaatgagattttctacaatgaatagcctagtttaagcatgtttttttctagtctttgtaaatcactatttgtctatctggaaacctattttgttctgtttgcagagtacctttcacttgctaatgatctgtgcaaattaaacagaaaaggggaggagaggcatggttaacttttcaaaacttctttcctctgggtggatggtaagcaagaagcaattatcctctgactctcctcactcccaaaaaacttcacaaccaaaaagaggaacaagcgacacatacatgtgcatttgcatgccaaccagaagagcaaaccagtgtgcagaaagtgtgtttacaacacttccttgcaaatgaatgaccgttagattagatactttccttattctgtataaactggtgcctgttgtatttctctgtagagctgcttcagttcagagcctgggcatgtgctttgatgtgagttttaccaatagaattccatttgagtagagaaaaatactatattaactaacttttgtgcagatgcaggcacagatgattcaaagtgttagcaactttctaaaaaccatcaatcatttaaatacccagtatgagaaataaaaattttgatttttatgtagttatctttgttctgcattaaatctcttttgtcatttttcaactttaacagtcctagggggagaagagagtaggagaactgggaaaggacttagtgtgtgcaactgaatctgattataattgtttaagatttattggttgataatgacaagttgtttttgtacattgaaattctagaaagttttaaattctatctttcatttaaaaactgagagctactaaatatttgggcatttgagtatcttggcacttgggaatcttattcctgtcttgatttgtgtgggtcgcgtttttgatgataattacaaagaggattttgtggtggctttgaaaatcctcagtcttgtaaatagcattttgtgatccaaaagccaagggaaatgactaaatggatctttgtgacattttaagaacaccaaaaggtaacttctttgaacgagatttatgaatgtagaaaacttaataagcaaagaatggatctttgtgttttttcttcccaacattaaatctaagaggttttctgtggacagtgcaagaacaaggccctgcagatccttcctctgcttatttccccacacctgatacagtttctactggcactttttaattattctaagtaactggcacaatgaaatgttttcgtttttattctaataaggtttagtatgtgctaaaagcaattttataaagatctctaagcaaatattgtactgtacttgtatacattacacttgagaatgttccaggcaagtaagttctaggtttttgctgtgcttatcctactgaagtatgatccctgcctctgctgcttttttcaaatacataaccataactgcctttatctccatatatcaatatgcagaaacaatagaatgcttgtatggctatctgtgcatatcccaagagaattatttgtactgggggaaatgcagttgaaaaaaagcaggaaaattaatagataggcatagagccttatatcttcatatatcctctaataatggtagaatttggttttgttttatgattcatccaataaaactatataatttactatgcattttaaaattaagaaacttatgcagaaagagcaccatgagatataagaggggctgtggcatatcagattatttttatatagtataatattactgtttcattgtcttgtattttggaatccagagttaatgttagtgctaaatgcaagtttactgctatcttggggacctggatctcacctacctatttatccccaatgtacatcatcacagaactttttagggcttccagcttgttttttcttgggaaactactgatgtggctaatgggcacaaacctgtttctaccctaaaaatgccttgagccataaactccagcccatagtacaagtagaggaagacatctttgcctactcaaattcccagaaacagagagaggaatccacagatgaatgccctgccatgttgttgtaatcagatcaaagatccagcttttacttttggccaatttccttaacagatcaagattggataccaaggtttctgacttccattccacattttatctgctgaatattaataattatgagtatataaagacttcatttaaataaccccactcaataatctcatctttttttctaaaagagcatttagcaaaatagagtcaactaacctgccaatatcttataaagaaattttataaagattggtttaatacctgcagtactaatttttgcttctgacaaaggaagatgtttatatcatcagaataactaaaaataaataatctgataggtattttgttgatcaccaacagtgttttatcatagtactatgcattgtgggtatccaaaagagggagaaagatacattcattccttgatgctgctcttctttgaggtggatttttactacctagcatttgtgaagtacagcatgttgtctcaacattaaaattgctttcatatgcagaaacatactatgtgcaattgtctgtgttaatatggacacatttctcatttagaagagagatcatgaactatctttatacaccaagtttaccttccccaacaatttagtaactttacagacacatggatattccagtcatattcccttgtcttttacctctgtacatggaaaatagctggttgcgaacatgggagcctctacctgcaagccttgtttttctggaaacagcagcccctcatcactaacaaatggcaagtaggtaaataaatgcccctattttggaatgattttaaggcaggtgttctatactgtgtctcagaggtctctagtttcccacagtggtaacttacttgataatacgctctttattgactttcttcctttactgaattattccccctttcccatctaggtgtttcctagaatcacttcccaaataaaccacttgtagttaaatccttatctcagggtctgtttctgggggaaccataaccaggacaataacgttttctaatacttcctattcctttaggttagaaaaacaggttcttccaaagcaccaccctttccttctccatgtttagcattttactcctcactgacactggcctatcgagccccatctttctgaagtacactagtttgaggcttctttctcccaggcctggagttccacagaagtgctctaactagaagcattctgcagaagtactctaaatagaagcatttctacttctcacttgtataattttcaggcaatcttacaaatcactaccagacaagttttactaatcttctattgtatccatggttttagcatttataaaacttcagaggtttctgcattcactaccttagtaatgccattcagttttatggctttatatattatatatatgccacagactcccaatacttatatttccatatcaaatctttctctcattccagtcttttagataccactacctacttgacatctgcacttagatgtctgttagacatttcacattcaaaacatcaaacctaaacccctaatctcctcagacaaacctgctctttctgcagccttccccatctcagttgatggcagtaccatccttctagtggctttggagagatccttgatttattcatttggctcttaaatataccctgaccgaatccattaggaaatccttgtgttcataccttcaaaatatattcagaagctgaccatttctcctcctctccaccagtgaaactctggcacaagccagcatcagctttcaccaggaatgctacatctcctggttgttctccttgcttcagtttctgctgccttctatcctcaacactaaaggcagagacatccttttaaactgttgggtcacagatcatggccttctactgcaaaaagccagcatgcgatagatgcatgtctcactcgggtaaaagccacaggaactggggttacatattgatcaagatacacgtttcctattctcttgaaacgttagggtttctagtagcttttgaagtataatagttttaaggtataatcctaattaactgtacttctcagctctcctcctccgtccctttccactagaatccatgtcccaaatctcctacctatgggtccaggtggaagaatggaaaagaatcaagcaaggaagaaacagtgcccacagaaagcaaaactaagaaatcctgttacaataccataaggccactgtagctgcaagggatcctgggaaatgcaaatatttagaagggtctgatgctgtcatcaagaatgtgtgtgtgtgtgtgtgtgtgtgtgtgtgtgtgttttcagttagggagaaagaatgtacactgtgtagataaatagtttctaccacagatggtgaaaaaatacccatggtttacactaagtctaggtcttgtccagttctgagcattttaatcagaaaagcattactatactcacttgtgtttatattaaaataagggctatttattgccaccagctcaggaaatgacccagtgtggccgtgtaagacagaattaatttgaagtgactccagctaaaagttggctgccttttaacttaataacttgagaactgtcagtatcctttgaagttaatgatagttgtaaagtgcaaataaaaatttttctaaaggaaatcaaacacactacagccaataaatggctgtcactagaatgctctgtcactgaaactattcaggtatgtgcgaggggagggtggaaggctggtaatctgtttagaatttcattgttattttgtcttgttttgttttggcttttggattatagaatgcccaacaagttttccccttggaaatgaaatttaagccatttaatgggtttctagttgttgggtagcatgttagaagcaaagttattttgtatgagcatttgtgttggaaatacttgcaatactagtgtcacctcaggcataaatgtatttgcgcagcacgacttcacatggtaaatgaaagcattattacttgcttgtctttctgtcatgggaggcggttttccaaataggtatatggtgcaccatgttaattaagttttattttcgttaatgagtaaagtaactggctgaacaaagagtaaaagatttatcagtatggaaagagcaggcaactgtttgtctaagttatgcaaagtagcaaatgggtcatctcaactaagcatcaggcaacatatcatgtatgtgtgaaatgtaactgtttctaatttcagacccaggttattagcagcatggaagctcctaatgaggctggagaaagtttctcacataggagcatcctgccttttatttacaatgatgccactcaaaatttgtttcagcaggaagcaacactttccatttttttcttgttgctcatttgtgagtttatttctacttaatttgctgatccaaagcgatgccagattgacatccctggggactgctgtttcctgttggtgcctgtgcaaatgaaggcagcaagcagaagttctatgttttctggatttcttggtggttttaggttgccataggcagaaactaaaaaccatatagaaaccttagttgatatgctctacccaccaccacctccgaaagatgcagcagccaagttaatttggttaaggttggttaaagggaaatgaaaggatccttcctctttacgtctttcttaaatacaacattttcagaaccccaaactttgctataacttgatgcttctaaaatagtctgattacaagacatatgagcttattaaaatgtggattttaagtttcttatcttggagattgaggcctaggtgatacccaagtttctatacttttaataagcatcttaagtttctgttatcatcaggcaagtttaagaagcacctctcttgcatgtacaggcagcttaatggactttatattaaaacactaagtttagtaatgtattaactttgtaagtccctcatttcctcattatggagtatttattaccaggatacatgtataaagcatttagtgcccataacaacatgggcactggaggaaaccatttctctctttatcaaataggactaatagcattaaaagcaataaacttgcctgacaacactcaaattatccaagcattgaaagacccctaagaagccactggtagtagttagatgccaccttctttcctctttgccaatgcaaaacaaaaccaaaaccaaaatctattcatctcctttgaacatccatccatttggaagaatcatggtttgtaaaaggatactatttgtcttaaacagctatgtttatttcaataggataccacataggtcaaggtatgtttgagtgtgttaagcaatttggaaatatgttcttggaaagcacaggaagacacgtccccctatccccaccaaataagaagacatcagagcccaaaacacaattttaatatatcagagaaggatatgctaatgagttttcttgtagtaattttttttttttacatattgtatctatcttgaaaaacatgctaggacaggttcacaaggaatatcatcctctggaataagaacatgtattgaatttcaatccatgtcaaggatagattatgagcctatcttacagtatatgatggctatatagttaaaattattaatccaccaaggctgtaactcacaactcttaatattctgatattattctgagaatttcatttaatctccctggatcatgtggcttataagattttctctcacagctgaaaaattacttgatagtttattcatcaccatcttctgttacttggcagagctcagaaacttttgatgagtgtatcatggtcactatttgcagtacaattcgcaattcttgccgtcctggaactactaaaagatagcctcaatcctgaaatgctcagttgcattttaggtgaatgttttgtaaagcatttgaaatctgcaaagatctgcaaggaagatacaggccaacacatcccgtaatttctcctactctaaaatttcatcgtagacattacttcacttgaaatattataggaaaggttgaaaaactgttattctttaggcattactgtattaggtatatttttgttgttgatcagacattgcttcgagctggaaaattttcttaatgtatatcgctgtaaattaagactacattttttatttgaaatattagaaaatattttgattcctgtatctgctataagtgtgaatcataataatcctttctttaagagttaaaagtttcttttatcgtattgtattttgaaatcttacaaatttcaaattatttactctggtttacttacaaaggcacaaaaatgacattgtaaggaatagttcaatttgagggaagaggcctgggtgaggctttaggcacgtttacatggtctaccttggctgaatttccaagcgatttaacttaatctctttctgaaagtttccagaaattaatagtatttatctacttttacaaaaagttagaaatgactttcatgtctaagggaaaggagatgatcatatacaggaaggataatttggaaacactttttgcaaactatggatttttaggtcctatcccagacctaccaaatcaaaatatccaaggggaaatttttgaaaattgtattttttttataaacacgcctagtgatacttttatcattctgcaaactttggaaacatcacactaatacatctgtaaggttgaatttacttggccattacattctgcttccatagtgtttgtactaagatgagaaaatgttcactgtaaaatactgtatggcaaaaaccagaatatacactatagatgatagatagaagatagacagagagagagagagagagagagagagagagaatgatcagaatgcagcacagaataaataaaaagtgtcactgtaaaagctggccttggaagtcctctttttgtttagaaaaacacttgcatataaatagagaagcccagtatctgcctgagagaaggatgagtgtgagacaaagcataaccgaagagcaacagcaatttttacttccctggtttttcttggaagaaggccagatattttttaaagggaaaagaagagacactgaacaagagattaaagttccaggagaaaattgaataactgttcaatgaggtattcagatgacggggagatataaaaaaaagaaggatatctgctattgaaacataaactttttgctataatgtgttgtcctgaactctgatataatcccctcctatgccctgaccatcaggaagcatgctctggaagggcttaagagaaaagccactgctatgtcactatattctacctacaggttgatacaaggctgagagaaaggaatgctagcaaatcagaatggcatatgagcagatacagatgtgtaactatgccaagtatttccccagatgtactaggatgactccagaaatctaaaatatctggataatctcatgcagtaaacattttattgacattttggttacacacacacacacacacacacacacacacccacacacacacgaaagacggaaagaaaacagcaaaaggtagaaagtttatctctggatgttaaaattgagcatatattacctgcataacaatgaggaaaatgattaagcttcggggatcattcttagacattttaaacaaacacaattctaaatttaacagaagataagcgaagtttgataatttaaaattctataggaccaagagcttgcttcactagttaatatttagaaacatcaattggtcagtctgttgtaaataaaatccctgggttcttgaaggatgatgtgttacacaaaataatttacactgaactatttgatcgtgcatagattccactggttcaaagtggaggaaaacattttaatgattttacattcatctgtacaattctttctgctatcaatcatatagtggtccttggcattttttccttgttttaaagtagctttttaccctatataaagaataatacatatgaaacagtattgtatttaaccctaaaatattccatttctgctgtcagataaactgagtttgaaggctatctctaccccttactcctgtgtgaccctgggtaagttatttactgtctctacagctgtgtttacccatctttaaaaatggggataatgattcttcctacttcatagggcttttgtgagaattacatgataatacatgtaacaaacttagcatagtccttggccaattgcacaaaataaattagctatgaaatgtatttgttcataatagaaacttcaagaaaaataactaggaaagacataaaaatcctctatagtctcacctccgaagcaagcgataactgtcattttggtatcttttattcttccttctttatctaaagacaaattacaaaaatgaatctattcatacatattgtattttaatctgataagttgtgtataaactaaatcattttccctgttactaaatattgttcaaaaaaattattttcagtggccacatgctttcccatttgtaaagcagtatcatactgtattttaaaaatatattgctgagcataatggttgtttccaaaccaccagtatttcaaagaggctgcattgaccatccttataagtaaatatctctacatattcataataattggtttagaatcgatttctaaagttagaattgctgaatcaaatggtatatcttaaatgtatatttcatacacgttttaatgtactgctaaattgccttccagaatgtttgtgccaattattacttttagtagtatatcaaatactttttaaacaatagatacattcactttaaaaagaaatggcaatgacttttaattttttagcttattttattgagtttgaaaaagatttggccacttgtttttttctctcttgtatactgtatgaacatttgaatttaaaaaatgtatactgcactgcttctttaattgtcatattcactgaggtaacatttgttgagcatctactcaagacaggcacactgcacagggtgagagatgtaaagaccaggacacttatgctaaagtcagtggtgtccatgaagagcagaggcacagtgaaatttgcctggtccttctaggggctttggagatgcatattaaacatctgaagccaagggattcttcttagagctgtcctcccaagaaagagggaaccaaacaatgaggagatttggcaagtcctacccaaagagaactgacatttcttaggcattttatgaagagatacatagaactccagttccacttgttaaaagcaataactgctttcacttactgaacatgcacgctgtggcaggctcactgctgatattttacaactttctgcgatcagaaaggttataacccgtagatctgccaatgagtggattctgaccctgggtgaagtgaatgaactagcccaagagtttgcaattctaagtggaaatgctgggattcaccatctgatctgatgctttgctctgtcttctcttatttacacccaggtttctcagctttccacctttgttatatttgcattttgccatacctgcctgttaaccttttcttaaaacaaattgatcatctatgtttatttttgaacactttgttgttagtttccttaaaaaggaaactttgtatctctattataaatagaaaatcagttatatttgccatataaaaataaaataagtaaaaatgtatggtttcatgtgtaccaccaaaaagcatttcatctttctatcccctttcccatctcttgccagaggccaggctataacacctgaggaaacactgccccagtcactgcaaacatttagtcactagggacagcagaacaagactgtgggaacttggtaagaacctgggaccctttgtacctttcttctgttggtttctttattctcattctcttctggatggtctccagaataactggggagacaacacttacaggaaaagcgcatgtgttcttgtctcagagtggaagaaagaagagccgccgtgttccagctagtgctcagagaaggtgctctacatatcttgttgaccttgatttgagctataaaaggctgctgactcagagcattaaaacagaaccactggcttattctctgagtaattcaagtctgcctttccctcagtcgatcccagaggtggctagtcaagcctggcgatgttcatttaccatcagagattaagcctgtctggccaggctttgtctggtagcattttcttaatcaaatataatgacaatttgaataaactcaagtccattgaacattgttcatgttttattattaagaaaaaataggcactttgattcttggaacactttttaaaaggctcctcgctgtgtcagtctctgtttgttattttggggcatgacagttatctaaagagaaccagccagatttaatctgacagccacagtcagggaagagcgctaccaatctaattatccagtaatctagtcagaatgggagtaattctaggcctttctcaggcagctaatcacatttcctgtgcattagcagccacacatggggagcttttaggaacaaggtttttggcctgcacgggcttcatgagcctcatagtggtataatttctttgttgacttcttcccccagagtggtttcttcaggatttttcattttgttctcattcctacttttcccctgcattgccgagggtgtcttagcttagcttcaagttctaagtttgacgagcttctgactttcctttcagaatgcagcagaggaggaagggtacattcacggatccatatgcttatttcttgtgcagggacaaattaaggagcgtaacacagtctgcagggaaaaaagggagaaaaacgtgaaagttgttttcttcaaggaaagcgccgttgtttgtgggccatttttcatgtcatttctctatcaatgtgggtgatttgagggaggtttctagagaaaaggccggagaaaagagacagttaatggatatttagttctgtcgttgtctctgaatgtcaagctgtaggtaatattgatctcgtctcatttctgtaatcacaattttaacatggaaaaaggaaaacacacacacattcagggagtgggagcattaatgaatttcctgccattttctttctctgaaaacctccgtttaggataatttcatattagtcctgtaaagcagaatgtttttcgagtgcattggtttctcacactccaaaattgaggtttcagtggcagtatgccgcttctacccccagctttcaaacatttctccagcttctcataatcacagcttggttagtctgaatccaaacatttgaatctaatagaggggaattctagtcactaacaggtttacaatatagtaattttccccaaagttatccatgataaatgggcttcccaaatagcctctagcaatcacagcataacgcattagatggaacactccaaaaaaataaaaaaaaggaaatttgaaatcctgtgttaaattgtcgtgttacaattttgaacgggtttcaatcacaatttgcatcctctcaactgaaatttttgtgggcttaaacaatgcttttattccagtaattgtgggaggtatatgccactaggggctgcatagtttgggtgtgcctccatgcacagacaagaactgttgctgaatcataagtatatttgagcctcgtgtctgaagcctgtggacctagagcctaacgtgtctcagatggaacacgtagactggttccagtgcttcttgttctgtttctaattatgtcgtgtctgcattcattctaggtttagatctcacaaatgctattgatagaactttgcctaaaaggttcagtaaaactacaaacaaaccctagttttgaactgtcatccaatatattataatagtatatgaattttagtctttcattgcaggcactatattgtttgactctgattgtattgattgcacaggcgaaagtaggattatagccgaagagtagttcatggctgacatttttatcgatggttccatgaacctgaatgtgtacttcaatccactaaggtcactgattaaaatgtttacccaataaaaattacatttaaatatgtcaatagtacatcaacttacataacatctttcatctgaaaatataacaacatatatgagaaattaatggcatagtcactaatccctgtagaagtattgcttaaccatggttcacttctcacagaatcaaaaagagagaataaaaatggtatagcaaagacttttaatgattccagcatctattagggtatcattgtcacaaataaaaagaataccagttcctacatttctcaaggctatttctcaatacaagttaaaatgattcaggaatgcaggagatgcaaaaaaagaggctgcatattaagagcttgtttgagcaatggaacctctatgtatttacaaatgtggcacttttctctctgctttaaaacttagatcttgaattactcgagtgattgtgatctgcaaatcggtatacattgttgatttctctgttcaaattaatatctgctgaatgagttgggctttgtaaaagttcggctttgtgtcttattcattctctgccagggtgtctggtgctgtccaaggaatgtcccaggacagaagggtctttgtataaggaacaataataaattccattattgccatttatgaattatcaggctgccttgatctagttaacttctgtacaaagagtgctatcaacttcaaactttagttaagtcatcatgaggcaatgattccaagttttgatccattttataagggatcttccattttactgtatcattctgaatactgttcattttctgtcatttttaatttggtttttcttttaaaaagtcagcttctgtaacacgttttgactttgaggcagagtctactttgggtttgtgctaattttttcctcttagacaattaaaactttccaagaggacatttgatgttttgcagcatggatgtcatacatcccatattggcattgtgtaatgtttttggtaatattaaaataattggtagtttaggtgaattaccactgggtcactggcctttatcacccacccatatagatagccttttaaatttatattgtctgtttatgtgatttgccctggcccatatttggaaatacctacaaagccctacattacctctaatctgcttaggcaatcttgctggttatgcattggtattttatattggtaacatacaagcctgctatcatcttcgatgttccctttaatctatgctgtccaatagtgtaatcatttggctgtatgcctgtttaaattgaaatttaaattcattcacattaaatacaaattcagttccttaattgtactggtcacagtttacatgctcaatagttacataaaggtagtggcttccagactggacagtacaagtatagaaaattgctgatattgcataaagttctggtggacactgccttaaatgtctgataaacttatcaaggagaatgtctacattggcttagaggcagaaaacaattgtggctgtacaatttcaggttcaatactagaaacagcaaagtcaataaaagtggctgagactctcagaaggtgcacacttgtaattgcatctcatcatgagtgcttgctgcaattaaatgaaatcattcaaatgttggttttattaattctttaaaaggaacagggaaaatggccacttgagagttctttttgtttcactaccgttaatatgttacctaatgtctcttataagtatgtctacatttaaatactggtttaagtttcttaacaatttttatgtttttttttcataccaaatcatttctatgccatgccagccaaaggctcattttttctcctttttttttttcatcctaactacagttttcccttctcatttttcttcccttcccttccctgtctcctattcctgcgattctgtcttgatgatgtctaggtgatagagggaaaaaagggaggagagtttaaaatcttttaaagtagatattctgtttttggaatctcccacgtgatttgggtaaagtggaggagtctttgggggcaagtcagctatcttgcatatgtatcttcctcattcggaatgcgtgttagataagtgcaggataatctggaggcaaataccaggcttcagaagcatccttctcttttctttcttttcccttgagacagagtctcactctgttgcccaggctgaagtgcagtggtgtgatcttggctcactgcaacctccacctcccaggttcaagtgattctcgtgcctcagcctcccaagtagctgggactacaggcgcgtaccaccacaccgggctaattttttgtgtttttagtagagatggggtttcaccaagttggccaggctggtctcgaactcctgacctcaggtgatccgcctgcctcggccacccaaagtgctgggattacagacgtgagccaccgtgcacggcctcttttcttttttatcaaatgctgaaatctgaatgcccagggagattggtggcccttgccaggaagtgtcttaacactttgtggatactgctgcctgttgtctttaaaagctgggactcatcaaattaaaaacaaaaacaaaaacaaaaaagctacgattcaaagttttcccatgagacatttacatggcagatgcctaaatgttccattgtcatgtttctagatagaggtggaaaccataacaactaaatatgctgaaataattcagtgtggaaacaaattcacaaactaaaagatgttgtgttactccatagtatcttaaggcttaggattttcaagaacttggtatgattggaacatatctctcgcaggctgggtattcagagcaggaggtaaccatcttaaatacatgtgtaggcaaacctgaaagtttaagatttggggatttcatagcactctgatataggcatatgattcctgccatgatgttgtttaactaatgtgtgtgatagtcacacacatttctgttaaaatatagataaaagttattaagagtatttttaaaaatcctcaaatcttttgtgaatgtcctgtccaatctcaattataaagaattgcataagaatggttaagatctactgggtctactgaatgaaaaatcatacagaggtgttactgtaacaccatatatgaattcctgaaagacttcatgttctgcaaaatcatgcactaaaaataatgagacatggaaaccagtgggatgggcagaccacataaaacatataacaatttgtaacctgaatatttataaatacatttgcaatacaatcttaaaccctgatgttgtcccttgctccttctggatgtagatgttggatggcattcaattctcctagagactctttttattagatttttaaaaattatattcaattatattttcattaatctcttgttctaacatagggaaaatagaaaatgtctattttttttttttttttttttttgcgacagggtctcgctgtgtcacccaggctggagtgcagtggcatgaacaataatggctcactgcagactctctgtcccaggctcaagttatcctcccacctcagacccccggagtagctgggactacaggtgtgcgccactacacctggctaagttttgtattttttgtagagacagggttttgccatgttgcccaggctggtcttgaactcctgagttcaagccattctcctatcttggcctcccaaagtgccgagattacagacgtgagccaccacaactggctaggggaaatgactttatacttcttaacatgaactcacggcttatgtgaattagcttaaaggaaagcaaggagattcttgaaacttcttgcactaaaggaaacattttgcactaaaggaaaacaattctgtagaattacagtgtttttttttcctaaacatgtccaaatatttttttatttacttgtaaaaaagcttacccccgtcacttctagacattaacaaacttgaaaaagtctccaagaaaccaagacttccatgttattcttacatcattctcttcattttcaaaggcatatgagctaattcatgtcactgaaatatccagtacagcagaacaaactcattgtttccagctttaggaaaatcccctcagaaccaatgcaacttcaccacctgttttggggataaagaaggcgcccttaagccttttggcctaactaacatggtaactttgtcctcattccctgcttcagaattaatatgattttaataagtataacttctttggtctaaggttttcaaagtctgttaccccttcattccatttttataagcactactttttcccatgttattttttctctacttaattaatttttaatttgcaaatttatttagtttttgaataggtaacatgttcacatggcaatacatgaaaagatgagtctccttctcatctgtgcccatcattaagaaagtttcccttaagaatccatggaatcttgctctgcagctctggggcacaatttccatttgatggagttgtacaaatgtcacgtgaatttatcatcacatttcaggctgtgtcatcaaattctaacacatgacattttaaaaaactcatacaagcatattcttactttttttaaatttttcactaacaaggcaagctaactaagtgaagtaaatatatgatttttggcctgtgaaggtgtgcattacttaggctcttacaagtcataagggaaaaagtgctgtcatgggtgatgggtgcttattataatcatatgtgggaactgaggaagcataatgaaccttctaggcagctgcaaagtacctctgagtctcagaggttcccaatctgaaatgtttatcaagtaactggagaagttggagatgacacattgtcattcatgaaacaaggacaagtttacttgccatattttcttaacttccacatgaaaacatttttactatcttttatgtatatgcatatgttctccaaagataaaattttaatgtactagttagtatccaatgtggagatactcagtattgtctctcatcatactataattatgtaaatgccatccatatctattggatgccacaaactccacattaaactggcaaagatcattataatcaaggagtgtcacatcgcacaaggccaagtgctcttattcggaaggactgattccctattggccacgcccctcaggatgcaattgtggtgagcaagtcaggaagatcaacatttcagagactgtccagagaagagtggtttacattgtgtttagtttcacatcctcatacagagatgttacttgatttcatttgaaaaggattgtctgagatattttcttaaaaagcaatattttacaaacagaaaagaaaacacccagaaacgaagtgtatttgaattctttctatgagatgcctaggcaatcttttaaacccaaataagtcaattactcctttctttcttttttttttttttttttttctgagacagggttttgctctgtcacccaagctggaggctggagtgcagtggcgtgatcacaactcaatacagcctcaacctctggggctcaaacaatcctccttcctcaaccttccaagttactgtgactacatgcccatgttatcacacccagctaatttttctgtattttttaaagacaccatgtctcattttgtggcccatgtaggtctcacactcctgggctcaaatgatcctcctgcctcggccctccaaagtgctaggattataggcatgaggcaccacgcctggcctccttctttgctttttctttttgaagagataggttcattgtggcagccaaagtgtcacttatatgtagtgcctgacaaggtacttgcccggttgacaaatgaattgaattagataaagcaatttaattactgggtaagacactgcttaagttattaaaaggcagcactaaaataatctttcaggtatgttagctaaaagtacccattttattaaagctgcattcttatgagactaatgcttcaaccatctatttgtatggaaaatctaagggtcttaaccacatttcaggaatttaattaatatcatgttgtgtttaggaatgctggtttattcactagggtataaatgcaatttattttacagagcctgaagtctttatatgtttctatacccctggataaatctcaactattttagttgttgattttttttgatgttgcctttaaaaaatcaaaactatatttattactttatcaaaccaataggccatcaagctgtcacatgaaagactaaaagactgacttaatcacagcatcttcagatcaacaacaaatgctttccctgctacagaggctactgatttcaggacatgggaatcagaatagaggtcttgcataggactctacctgcctgagggaattaatacatgtaaaacatgttcagtgtgttctatcttaattagaaacagcatctaatattgcacttagaaaattagagaaaactcaagaatacatttttgaaagaaatcagtttgctttatcatggactggaactcaggagtgtctaacgtgattattattctttgaacaagttaaattggtggattttgacataatggaagaaaaccttcctctctcttatctcatgataaatttaaagctgaaaggtcacttgtggtttgtacatgcatattcagaattaagcaaaaaattcattttgatttttatcagttttcaaaattaagaaaacatacaagtgtacacacatacacacaccgaaaaaccacagttttttattgaaagttggttagtttttaagtactgcccatcctgaaatagtaatgttttccctaatcctaaatagaaaactcttttcgttcattatccatcagtagtacttcagtgatataaatcctattactacaacttagtttctcccagagcaaatagctgaatgatttacaacaatggcagtttggatggttgatagctttgcaagatctcatccaactcagccatacatacaagttgtcatgcatcatataattttaaatacattctagaaataaataaataatataatttcacttaccatacttatatttttcagcctttgcagaatacatggtagttttaaaacattttttatcaacttaaaacttaactgtagcatactccagcttatacgcacataaatatgtaactatattctcctccttctctttggataactactgaccataaaattctgaagagtagaaaatccacctttctgatgatggtggcagtcagaagatgtctttcatcccgaacaatttagaaatgtagaaatttcaacgtgttggcaaattcccaaagtttttgtaaacctgtgaaatgtacagagattaatgtggttatgatttcctcaacggtaatttcaatttcagctgtctggtttttatacatataaattcttatgttaataaaaacttctcccttaccttgtatacttgtagggaggtgggagctgaagtaaagaaaaagtaaaaaactcatataaataacaattatttaagcattattaggatgctctccaaagcacgtagaacctagataaacactgaatattagataagaaaaccaatattatttataatttccatgcctacatttacccatttaatatttatcacaaatcaatggttttaggccctcctgctagtgatcttggggaggagttgactaagaggctatagcagaattgtatttctcacatgcatagaatcagagacaaaattaaaatttcccaaagaaatttccttttggaagtttctaaattgatccatgcaaaaaaataaaaataaagctaagggtgtttaagcaggcaaaatgtttggaattttgtttcttaaatgtctttaaggtttgtttttgtgactaaagctctctaatctcggaagtcttgaaggaatctttttaccaagccacatgctcttttgtgaatttctgaattctatggaaatgtaaacttcacaagtattgatgttctgctcccagaagtgtaaggctgacctctgaagttcaaagtctctttcaatttctttggtgtaaacatccaagaaggttagaagagacaacttttagaaagcaaggaaatgggtagcagcagattttatatcaatggtaatgtagaaatcaacttctatagtcaaattccaaataagctgattaagaagaattaactggagatattgatgggaaagagaaattgttgggaaaaataaaatgaacagccttggtgaagaattccattcgttgttaagatttgctcagaaattgtggtggtggtggcgccatggtggagttttagatcaatacaaatttagcatttaattctagatctgttgcttattagccattagatctcagataagctaattaaaattctgagtggcatttcctcatctgcaaaattgggattagtatacttatattgcatggttgttttaggattataggttttgagtagaaactattaccctcacacctggaaagagtaagttagatctactcttacttcactttcttatcctcattgtcgtcattatcactgaagatgcataacgctgtttaaagtctgaaggatgatacagaactgacggtaaacctctctgaaccatgtttaactgcctaaggctagacacgcagtgatatcagaattaatattgttttctttcaaatgaaggattctgagctgtggaccagagtgaggatgtgtatttatgggcttctaggtggtaactgttcttgtgtctaaaccttaattaacataacactctttcacacgaataaaactttcattcattatggttttggcccataaaagttgaagttttttgtttttgtttttattttttcaccaaatcagccctacagcgattcctccacccccattagcaaataccgtaatatatgtctctagtaatcatcctctcacaattctgcttttcctaattttgccgtgagtcaagtttcttgaccacaatgttatgctgaggaagatctaatgttttccatggagcagaaattgttagtcctcaactccaaggtctgccttgtcaagccctgttttccgtgtcttcataaaccttgtcaggcatttatttattcagcacatatctactgttctctgcacaagaattcataaggatctgatgaattatgtcccttctgagtggaatttattcccttctacatttctgcaaaacaggaaattggtagtaagtcaatttgaaggtactatttagctggcacttctgccctttcttttttaacagctgcctctatagacagaacgttgaaatgaaaagatagggaaaattggcagaaacactctgcatgtaattcctatttagacagttttaaacctattttacaaatgataaacctggaatatagtagggagagatttggtgatgaaagaatctagatttcttaactccttattaatacgtactttaagtattggactacaaacttgcatatgtcactggtaatcattgaacacatgttatcatgtaggcactatcaaattggagcctataattgatgaatgagggatatcactactcatctacagtaaagggtcctgaaatgcagaaatatggaactggtgtgactgtatctttggatatttcaagagaagccagaatacatgaattggattcgtgtgtgtgtgtgtgtgtgtgtgtgtgtgtgtgtgtgtgtgtgtgtgtgtgtattgggcatgtatttgacttttaaactttttttttttgagagagtttcattctgtcactcaagctggagtgccgtggtgcaatcttggctcactgtatcctccacatcttgagttcaagtgattctctcacctcagccactagagtagctggaatacaggcacacatcaccatgcccagttaatttttgcgttttttttttttttgtagagacagagttttaccatgttgaccaggctggtctcaaactcctgggctcaagcaatctgctcacctcagcatcccaaaatgctgggattacaggcatgaggcactgcacctggccaaaatattaacaactatttttaaaggcagtactagccaaagaaaacgtgacctgatagagattgtgacttcagaagtttaaggttttacctcctaaaccacatgcttcatttcatattgcattttaactgatgcccttttgttttattctgtagcctcttccccttactctttcttcctcagtgtcttcatctgtgaaataggaataagaacatttattttttgccttcaaacgaccaaggattgtggtgcatgtgaagattaatgaggtcatctggttaagctcttctccctgggtggaagaacaatggcttgtgaatactaagtggcatttgaatcatgtgtgctttcatggaaagagagctggtccatttagctccccgtctgcagggagttataaaagaagaaactagggaggaagaagctgaaaatatttcttcatgactatttcctctggtgaagcataaagtagcaatgagaattctgagatttgtttgcgtgatactttagtcatgcaccacataaagatgtttcggttaaggacaagttacatatgtgacggtggtctcataagattataatagaaattaaaaattcctattcctaagtgacatcatagttgccataacatcacagcacaatgtgttactcacatgtgcgtgatgatgctggtataaacaaatctattgtgctgccagtcatatgaaagtatagcacatacaattgtgtatggtacataatgctaatcatgataataaagattatgttattggttgacatacttactatcctatatttgttattttagaatgtaccacttctacttataaaaataagttaactataaaacaacctcaggcaggtccttcatgagatattccagatgaaggcattattacagagatgatagctccatgtatgttattgcccctaaagacttctcgtggagcaggatgtgaatgtggaggacagtgatactgaacctgaccctgtatatgcgtggattaatgtgtgtgtttgtgtctttttaacaaaacagcttaaaaagcaaaaaaaaaaaaattagaaatgtaaaaaatagcagaaagcttatagaataaggatatgaagaaagaaatatttttacagctatgtgatgtatttgtgttttaaggtaggttattataacagtcaaaaagtttttttaattaaaaaatttataaggtaaaaaagttacagtaagataaggttaatttattattgaggaaagaaaattttaagataaatgaagtgtagcctaagtatacagtagtctacagcagtgtacaacgatgttctaggccctcacattcattcaccacccagtcactggctgacccagagcaagctccattcatgtacatcatttcaaaatcttttataccatgttttcactgtacccttttaatgtatagatatgtttagatacacaaataagtatcattgtgttactggccacaatatacagtacagtaacatgctatacaagtttgtagcctagaagcaataagcaacaccatatagcccagctgtatagcagattatgccgtctaggtgtgtctaagtacactctgtgatgtccacataaggatgaaattacctaatgatgcatgtgttagaccagatctctgttgtgaagcaaagcataactataaagactctgtatgcaatataatgtaaagagagcaaaaccctcacaatgtgagttcatgagtttatacctgttagcaggtgtgtgtgggaaataacctgtctacctaaggttctgtgtagataccttaggacacaaggacaggtgtatgtgacctgtctacctaaggctctgacccataaccgttttttatgctctaatcaaattgtctttttaatcactggactctccctctctctcgtacattagttagggtagactaactactgaaacatacctcaacatatcattagattaacccaatagcagttcatttctctctcagatgtttctagctagtgggtgacatttcatataatgattcaggaaaccaagccttttccatcctatggctccatcatcctctgggcctccccattagctagcaaacgcgataagaatgcagtgaattataggtggaagatgattatgagcgaagtctgagagtggcacatgtgatttttgactcacatttcctaggctagaattcagtcacatttccacacacaggaggctgggaaatgtggtagagctctgccctaagaaaggggacctgattttggtcagccacagacattgtcaagcataaagtgtttccagtcatttgccctcccattttataatctaccaggtatatggttaattcatttaacagaagatgctggagatggaatttgtcattctgtttactctgttgcagctctgcagctattatactagcttctcgattttcattaaatatatctcacactattttgacgggtgctttttaacctttctgttttctccatatactaactgcattctccaccttattacttgaaagggagatttcttctccactgagcattgaaagtgttcaactttgaaaatgtttattgtcagtaagctttgatggtgacaagcatgcctgtgactgtctgtgatttccttaggaatgtcctggtggaacttattaattcctggatagaaatctaaaaatatgtttgttatttttagttttttattctgagactctcaagggaggggcagggttctctttggaatgatgtgtaatataacgataaaatgattgaatattgtgaaattatggagtgactttgattagtgtaggcagtcaatactaatcaacacacacaaagcaatacaaatgttcttgctcttttaactcaatgttttatatgatgtgactcttaatgattgataaatgatacgaaagaaaagataaatacacattcacccaaactgttacttgtcacaagaattgccaacccaagtagccatgaaaagcataggtttatttaacctttgacaaaacttctcaaaccattcatgaaaatggaaagcttcaaggaaaataaatgaacaaaaatatcccccaacgattgtctgtctttaggccgtagagtgtagtgtttaagagttctataaatggactacccaggtttaaatcctaggtataccaaatgctacctgtaattcttggcaagttaattctgaaacttattttcctgttttgtaaagggaagataataaaaataggacccgtgatgtcttagcaggaattaataaaatgatgtttgtgaagatcttataacattatgcatggccggtagaaaacacttgataaaggttagttgtggtaatcacagagagaagaaaaccatcttcttacagagcaaaagaacttaaaacaatgcttctcaaaattttgtgggcatagcagtcacctgagtgtcatgttaatatggcagattctggttctttaggcatggcatggagcctgagattctgcatttcttacaaatttccagatgatattgattttgctggttcgtagaccacactacgaatatcaatgaattaaacttcagttatagttatatctttatctaaatcttggattatctgctctttagctatgaatgtaatcattcgattcctggcaaatgatgagaaggaaaaaattactcttcgtgatgcaaaatacttgagaaatttccgtaagtaagcaaaagatgctgttgagctagatgtctgaggaacaaaagaagttatccaaattctcattcatgccgtaatttggtgacaagaattattatggcctaggaatgtagttttaagagccagtgaagtaagagtaatctgcctcaatattaatgaggctttttgacattctgatttcttatttatttcttatttgctgttttttgtttgtttgcttgtgtgtttgtttgagacggagtctcgctctgtcagccaggctgaaatgcagtggcacgatctcggctcactgcaacctccgcctcccgggttcaagcgattctactgcctcagcctcccgagtagctgggactacaggcacgagccaccacactaactttttgtatttttagtagcgatggggtttcaccgtgttagccaggatggtcttgatctcctgacctcgtaatctgcccgcctcagcctcccgaagtgctgggattcgaggcatgagccacagcgcccagcctttattcactgtttttaaataaactttattgagaaataagttatatagaatgaaatgcacattttaaatgtacagagattttttttccaattttttatattggtaaaatataagtaacataaaatgtaccatcttaaccatttttaaatgtatagtttagtggtattaagtgcattcataatgttgtgcaaccattaacactatttatatctagagcccttttcgtcttttaaaactaaaactccatacccattgaacaataattccctattcccccattccccagtcactggcaacagccattctattttctgtctctgtgattttgactacttttcatacattatataaatggaatcatacagtaagtatcttttgtcgctaatttcatttatttaatgtaatatccccaaagatcatgcatgttgtagcatacataagaattttcttcctatggttgaatactattacagtatatgtatatactacatttcccttatccattcatcagtcaatagatacttggattgcttccatgttttggctattgtaaataatactgctatgcacatgggcatacaaaatctctttgaggccttgctttcgattttggtgggggggtggttacagagagctggaattactgcatcatatggtaattccatttttaatatttttgaggaactgccatattgttttttacagcagctgtaacactttacattctcaccaactgtgcaccaagggttcttatttctctacatcctcatcaacacttattaccttctgttttcttgatagcagccatcctaatgggtgtggtgaaatcttagttttgatttgcatttccctaatggttagtgatgttaagcgtctttaatttctttcagtaatgttttatcgtttttattgtgcaagactttcacctccttggttaaattaattcctaaatattttatttattttgatgctattgaaaataatttttttataattcccttttcagtgtgttcactattagtgagagtggggtattggagtctccaactatgattgtgcaactgtctaccccttcaattgtcttttttttacttcatatatttgatggtctgttattatgtgcataaaagttcataatcattaatcatcttgctatattaaaattttagtaatatgttcttcgtctcttgtaaaatttttaaaatttagtctatttagtctgagagtgtagccacaaccacccttgcactctttgggataccatttgcatttctttcatcctttcactttctatctgtgtctttgaacctaaaatgagtctcttatagacagcagatagttggattatgtttttcaatccattccaccaatctatgtcttttaattggagagcttaattcgttactgatacggagagacttacttctgtcattttgctatttgatttctatatgctgtgtagcttttttgttgcctccccagggttagctgggtttttttttatctcttccttttggttttttgaatgttgtagtttaaaaatattgtctctgtaccaaggattagcctgatgtgtaaacctaaattctttccagatcttttctgcacttgcacctttctcagggcatgtgtggtcactttctgatattccctatacatgcagtttctttcaaatttcctagtctttattgtcagcctcctatgcacagataaagagaaaaatgaagggaatagggataaggcactggaaatcattcagctggagggaagggggcttccaccaatgggaagaagtgcaacagttatgacagattctttgtctgcacttttgtaatcagaagcaataatcagcaatcagtgcacggatacccagtatttggagtacgtgatcctttttgcccactctgactcttactagctatctgcaggttgctccaggagcatgcgtacagctacctgccacgaggattggggtggggaatgggtagctgctattgagtatatgctggaatttgctgaaattaaccacaatttatcatccaagccttcccctggaagttgcaagccttcaacatacttcagagttacaaaagagttgtatcagacagattctacctgtgcaattgttgtccaggtggggagacaaattcttgattcttcatattccaccttcccagaatcccctatctgctggttgtgtatagaatctctttgagctgttgcctaccattttggcattattctggcattattatttctcaatatgctaaagaaaagactagagatttaaacggtagacaataactagcctttaagtttgtatagtatttttttgcctcctgtttttgatagatctcattgcactatttttcagagcagtgtcttaggattcctgctagattatttaatttaggtcactactgtttctgttaatatcatttattttttccccttaattgtccttttaactatgtataatcctgctgaatgtatgtcattgttgggagtgctctaatattcagattttgaatccactggtcatttctcttttgaatattcattttttcttatcttccttcaaagtacgcttatctttatttttatggaattctatagccaagccaagacgtggtacatgatgtacgtgatggcttgcaggtaggctttgaagtctctcaagagggttgcccttcattctccttgcacctatcctgctgctgtatttccatagtaaatggcatgatgcccccaacttagtgaaggtggatggtgaagctcccagagcctggaaacccagagcactcacctgatcaacatctcagttcccacttcttgtcacaatgtaccgcaaacattgtgcatcctcagtgcacacgttttcagtttttacaaccaacagtcctatttatcattttattataattgtcagctgaatgatctatgcacattttgtgacaacattgaccttttgggaggaaaaatagtctgtacttaagggttcatttataggggattgttctgttaaaaatacaacacatagagaaaaaagaatgtgataactgattatatttagtgatgcatgtataaatatacatatgaaaacttatgaagtcatggctctttgggaaataaaaatgttgaaagagagcccagttacacactttgacatctcctagtttttcaacagaagaaccattctatattacctgtttatagacactgaaaagggggaaagggcattaagattaactgacaataaataaatgtttaatatttttcgaaaattgagcatcaccttatatatgttaactcagtccatttcaactgtatgtagtagaaaaagctcatattcttgtgttacaaatattgacaaggaagaagaggtaagctttgatgcatacctaaagtgaccaaaagttagtgacagagccaacctgttaacaaaaccatgctgaattccaacactatgagaaaactgggattgaaagtaaatgctcacaccccaaagtgctctgatcatacttacttgatatctctgcttgtctccaaataattatctttgaatcctatccacgtgattctactctcttcttaaactgcccttctacagatttcttctccatgggaaaccagcagtgagagacatggcagtatagacatttcaagaagaatgagtgatagccaccaatgatttggtaatacaaagcttgtgctgcccatcttaatattttattaatatgaaaataaatgatataaaacatccgtttcttctaagagtatctttagctgtgaatatacatctaagacagttttaataaatatgtggggatttttggtgtaaatgtgttatccagcaagagggaagacagtagaatccttggaggcagaggttactgtctgacagaaagttatttggaggtaaaagttctatttttcttgcttgtttgtttgtttggttggttggttggtttttaaacaatgtcagtcatacaatgcctctcatagagtaggtactcaaaatatatgtgtgaaattaatgttgcctctccacaatttctccttgtggaataaatttttttaaatggcttttagttttaaatcatcttcatgaacatttcctgaaagagagagagagacagatagtgctttaatttctatcatctcctatgaagtatacaaatggtcaataacctctaaaattccttagtagcctatgttactgtcatccaattataatttcttgcataacgaagaccttgactctggattatcagtaatgacatttttggacatgtgtgaagaaacagcaactttttgtagttttgattaataaagtggccatggagatatctttgtggcctttaatgaactttcttttctgattcttcttacaatttgatagccttcttccaaaagggaaaaataagctcctcttgaagcctgggataatgcaatagcattgaggattaaattgatgaattaaaggtaagaggcaatttggggagctataattataccagtggcctcgagaagactatactatctaacagcttctgttatttttctgactacaccatggcatcactgggaggctcctcgcaatctactatgatcagacattcgtagattgtttcttttttaaaaaaaaattatatttcagatacagagaatatcatggttttggctaactcatatatatggcccttggaagtaaagttttgtccattagttcaaggccatgttcccagtgtcttgaacagtgcctggaggagcaggaactcaatagatattttggataaaggaatgaattaattgctcaattgaaaaatgtctatggcttcaattatctattattgtaaacctttaacaatagaggtattgaaagttttctgaatactatcattgaattgatatataagtatgaaccccttgaaaatagtaaaattatctggtaatcacttctgatcatgaatttcaccacttttcagatggaaagagaataacgtctctaatttggatccagaaatctgagattctggatttaagggaactggtgttaagtgcatttgttgataaaagttaatcttactgggccaggcacggcgacgcatgcttgtaatcccaacacttttggaggccaaggcaggaagatcacaaggtcaagagatcgagaccatcctagccaacatggtgaaaccctatctctactaaaaatacaaaaattagctgggtgtggtggtgtgcgcctgtagtcccagctactcgggaggctgaggccagagaatcgcttgaacccaggaggcaaaggttgcagtgagccgagatggcacgactgcactccatcctagagacagagcaagactctgtctcaaaaaaaagtaatcttagtgacaagtcatttactatgacttgtcatggttttccaaagttgaagcaatggttttttataaatatggtagatagccagtcaaatggaaatggtatgataagcattatacaaaaaaatagaactgaggcaaacacctctgcccaaacaccaacctgatagtaggctcagatgattaaaaaaaaaaaagtactttattttttttagagcaataggtattaaagaaagaagtcttttgaagatagctaaacattttggatgttaattaaaaccctattctatatgtgggttgaagcatagtttaggacacttctaggtaaatgtggtttatttctaaacaccaaatagaaaagagttcttagaggacacatttaagattattcaagatttctgtacagtgcaagaatccattgcggaagaaaagaaagagaaatttcttatttaagttaatgggaggaaaaagaaaaaagaatatttaaagcccaataggaatgggaagaatagaagaacttatgaagaataatgtttagtgaaaataacattctagctttctatataataccagctaaaggagtgtatataataaataatgaaaatgctagtaaccagaattaagcatatccagtcttttagaaaccaattcttaccagatttctgaaagataaatatttaactagtttttctatgtgtggtggactatgtggattcaaactcttccttactaattttactgttactttttaaacatgaggctgctgaagaataaccaaattctacattgtcctcaaggaagacacagccaattatatacgattgatttatttaattttgtcatttttttcttctttcataaaaaatcaatatagtttgaaaataaaatagtttacataacttagctttaactgaatgtaatattcaattagatttcaccaaataactatttcaataattcagcgttctttttcctcctcccctttccaaacactatctgtcttttctcctcccagtcaaactagttaatttgtcaggaatcgtgtcacgaacataaacattctgataatagtccctctttgcaaacagaattgatggcaatataaacaattgctctaagtaagtcagcatttaagtttgccaacattgcccttttaggctctataacttaccgagaactcatttcattttgagaacaacttattggtaaccagttaaaactagcttgatcttttttatttcaaatgttttatatgctcccagagcaaaaaaattaattaattatcacttgcatctggtacagaggtagggattctatatgaaacttaccaactgtgtaatgcagataaagtttctaatcttaattaaataccagttccattatctgaaagtaccagttcatatctaatgtttaataaaattccttacaatgactcctcatctcacttagggtaaaagccagtcagaataatctaaaaggctcgtctacagttaaccctctcctcaccttcttgcttcctctgttcaattcactagggttctctgctgtctgaaaatttccaaggcacgttgtcatataagagcccgtgtgtactggcatttcctctgcctggatgggtattctcccgaatatccatttgcctcctttatctctttcaagcatttgttcaaatgtcacttgataagttgaccaccctgaccatcctatggaaaaatatgtctctgctacttcagtacttcctatctttactcccattttatttttcattacagcacatatattaagtgctttacttttcaaattgtctgttttcaaccactagaatgaaagcatgatgaaggcagggatttttgcaattgttactgctgtatgcccagggcacaaaacagtgtctggcacctagggaggacccactatatgttttgatatttgcttaatgaatgagtaaatgcacatttactgcatcttatattttcacagggctttcagactttttctttctgtcagtagaaatgtgtacttttgggttccagaatcttatatggctaacatgtgggttaatgagaaagctaactcctttttatacttgaatggagggaatggcacatacataatcaaatatacgatttgattatgcaaaaccaatttttatcattaaaccattctattaagttaatattaatataattgaaagcagtatcatttgcatcatcggcattaatttcataactttttaggaaaagctatatgaatctgccaaaaatatttaatttttaaaaaataactggttactttgtatagaaataattttaatatttagcatgcttatacaaatgggaatgagcttatcacagttgttaatgagtagccttcaatttgttagctttgaagttcaatcatttacgtagcacctactcacctaatttattaatctactattaagttcaaggattatcttgctaccaccaaatagggcgaaaaagaataaaaacagttttactgccctgtcttgtactcaataagccaatgtttgaaattatctaaaaatgtaaattaatatttaatatttaaccaaattgtttccctgctgcaaaaatatctgggaaataatgttcttgccctcctttccccaaataaattgtaaagataacaaatggaaaatattggtgataattggacaagctatggcaatctgaatgagatgaaatatgattttgaatagattgctacctactgtcaagttgacattgacatagattggaaaatatccatttttcttgtgtaaagaaccattacttggcttcatttaattctcgggcattctctaatctaatctatcccagtggtataaccatgtagtctctggaccaaacaacgtcagtatacccctgagaacttgtttgaaatacaaattcttgaaccctaccccaaacctattaatcaaaactctgagagtggggcccagtgatgagtttttaaacaactatttcagatagttctcatgcaaatagtttgagaaacactgattgttcctgttctgtcaataaatatgtagacactattatgtataagatactatgtcttatgcagaacagtaagatgcaaaatatatgtttcctcccatagaagaaattatcctgaagattactataaagattctgaaggaaagtcttctgaaatgacattctgctagcaaccatgaatattatttgttgaagaaatgaagcactgacccagtctttctctggcttttgttttatttttagaaatctctaagcccatatttataaatttaaatttgggagataaaagagtttaagtttaatataaaaacattagtaatcctgtcaggatgaaaaatcatattcatgtacaattgtaacacaaaacaaaataattcttttttatcatacctccataaattttgacttagaaaatcgagtaagaagtaaccaatcagaataaggataggagatgttcaccaagacacttcctttactatctttgaacgatacaattaatcactgtttcaatttctttcatgtcattctcattgtaaactatattagcttcttcatggataggatacatttgatattatatgtcagttgtccagacagaaaaacacaaaacactctaggtatttcagactaagagcctttaatacaggaattgtttacaaaaatgttaggactggaggagaaaagagcaaaggatgacataaatcagacattagaaaaaagaaattgctacttcccctaaggttggccaaccaaaactgaggagcttgtcttagcagatcttagggttacatacctgtctaacactgctgtaggactctgctactcagaactgccaccaataccactttgagagctgccaaatactactactggcctaggctggccctgccattttggtcagcagtgctagagcaagctagcagctaaactggaactgcaggtttgctggaacgtgtagctgcctactgatgttgaggacaaatctagaagccaagaaaaaaaaaataacacttgccttttttcctatctttcagtatcccactagtaactcccattatcagaagtaaccagaagttagctggaaaagtgttgtttgcagggtctcggcccatggaatacaaaataatgcacaaaagggtggaatgaagctaaaagaaaggaggtacaatacttacacagatgtgaggacatatttttaaaaaatcagttggacttcacagaatcacagaatttaagagcttgcctgatccttgatatccttttgcctgtgctattttttgaaattttaatacttttcagttatataactgaggttttgaaagaaaatctgaggaataagttcattgtaaaatagataaaggcaaaactgtgtggaaactgatgttgaaaggttagatccctgcctgtagtgggcactattgggatgccattgtaccccatcattttcccctttgccagattgactgatgcgtttcccacttagttgatggaagtgttggtttcttctggctcacagctgccctgttctctggaaaattgccctgggctgaatggaggtgccccacgccctctgggtaggcttgctgctctgacaaaaagctattctccttgtctcaaggcagagccagcctgtggtgtggagtgtgctcccgaaccctcatgggagagaccaaagctagactttaccttaaactatattgtcacttggctcttctttcttccccttacggctttacctcacctacttcactccctcaataaatcacatgtcctgaatccttgtctaaggttctgcttctaggtactccaacctaagatggtatccatactgtttctcctcactctcaaatttgagcttcacatgagttgcctcattttacagtagacaatactgagtcacagaaagtcatctatctaagtgccttgtccaaggtcatgttgctttaaacctagtgttccagccctagattcattgtaccacacggtttttaagtctcattaaaataaaaaaatcaggatatttttgtaatttcccttaagatccgcaaaatgaagtccggagtgactggtagataaaaattattgatttaaaaacaaagctgtcattgaggtgttagattaaatgactcctagaaacattgtgggggttccatgggtgatttttttcagccttcacatgagtgtacattctcttcctcattccactttcttcctcctttttgttgttcatgttccttttcatgttcagtgctagttttgttgttgttttttaaaccacctgtgctgaaggaaggactggtttcttactggggcgactgcacacatgagtatgcaataactttgattcagctagcaagtgcgctttcatagaatcatgcctgggaatctttctgaataaatcttacactggtgtcctttgccaaacttcgcattttcaaattgcaggtcttatataagggctttcaacttaacatttgtcagtttttgtttttgtttattagcttctgatctcttttaacaaagagatcattccatgtaatcattccttataatatttgataggtctttggtgctagtcaaatacttttctacacagtaaatgatgtttaacatattcctacctacataaaaggctaaacggacccttattatgggttaaatggcgttctcccaaaattcatgtgttccttcccccatctataaatctgaccttatttggaaatagggtcattgaagatttaattagttaagaaactagtaggcttccagttccaagaaggccaaataggaagagctccagtctatagctcccagcatgagcgacgcagaagacggatgatttctgcatttccaactcaggtactgggttcatctcactgggacttgttggactgtgggtgcagcccacagagtgtgagccgaagcagggcagggcatcgcctcactcgggaatcacaaggggtcagggaattccctctgctaaccaagggaagccatgacagatggttccgggaaaattgggacactcccaccctaatactgtgcttttccaatggtcttagcaaatggcacaccaggagattatatcttgcacctggctcagagggtcccgtgcccacggagccttgctcactgctaacacagcagtccaagatcgaactgcaaggcagcagcaaggctggtggaggggcgtcctccactgctgaggcttgagtaggtaaacaaagcggctgggaagctccaactgggtggagcccaccccagctcaaggaggcctgcctgcctttgtagactccacctctgggggcagggcatagctgaacaaaaggcacagaaacttctgcagacttaaacgcccctgtctgacagttttgaagagagcattgcttctctgagcacggagtttgagatctgagaatggacagactgcctcctcaagtgagaccctgacccccaagtagcctaactgggagacatctcacaataggggccgactgacacctcacaaggccgagtgcccctctgagacgaagcttccagaggaaggatcagacagcaacatttgctgttctgcaatatttgctgttctgcagcctctgctggtgatacccaggccaagagggtctgtactggacctccagcaaactccaacagacctgcagctgagggtcctgactgttagaaggaaaactaacaaacagaaaggaatagcatcaacgtcaacaaaaaggacatctacaccaaaaccccacctgtgggtcaccatcatcaaagaccaaaggtagctaaaaccacaaagatggggagaaaccagagcagaaaatctgaaaattctaaaaatcagagtgcctcttctcctccaaacgaacacagctcctcgctagcaatagaacaaagctggacggagaatgactttgacaagttgacaaaagtaggcttcagaagatcagtaataacaaacttctccaatctaaagcaggatgttcgaacccatcgcaaagaagctaaaaaccttgaaaaaagattagacgaatggctaactagaataaacagcatagagaagaccttaaatgacctgacagagttgaaaaccatggcacaagaactacgtgacacatgcacaagcttcagtagctaattcgatcaagtggaagaaagggtatcagtgattgaagatcaaattaatgaaatgaagcgagaagagaagtttagagaaaaaagagtaaaaagcaacaaacaaagcctccaagaaatatggtactatgtgaagagaccaaatctacatctgattggtgtacctgaaagtgacggggagaatggaaccaagctggaaaacactcttcagggtattatccaggagaacttccccaacctagcaaggcaggccaacattcaaattaaggaaatacatagaacaccacaaagatactccttgagaatcagagcaacccctagacacataattgtcagattcacaaaggttgtaatgaaggaaaatatgttaagggcagccagagagaaaggtcaggttacccataaatggaagcccatcagactaacagtagatctctcaacaggaactctataagccagaagagagtgggggccgatattcaacattcttaaagaaaagaattttcaacccagaatttcatatccagccaaactaagcttcataagtgaaggagaaataaaattctttacagacaagcaaatgctgagagattttatcaccaccaggcctgccttacaagagctcctaaaggaagcagtaaacatggaaaggaataaccggtaccagccactgcaaaaatatgccaaattgtaaagaccatcaatgctaggaagaaacttcatcaactaacaagcaaaataaccagctaacgtcataatgactggatcaaattcacacataacaatattaaccttaaatataaatgggcgaaatgctccaattaaaagacacagacttgcaaattggataaagagtcaagacacatcagtgtgctatattcaggagacccatctcatgtgcagagacagacataggctaaaaataaagatatgaaagaagatctaccaagcaaatggaaaacaaaaaaaagcaggggttgcaatcctagcctctgataaaacagattttaaatgaacaaagatcaaaagagacaaagaaggccattacataatgtaaagggatcaattcaacaagaagagctatgtcttaatatatatgcacccaatacaggagcacccagattcataaagcaagtccttagagacatacaaagaggcttagactcccacacaataatgggagactttaacaccccactgtcaacattagacagatcaacaagacagaaaggtaacaaggatatccaggccttgaattcagctctgcaccaagtggacctaatagacatctacagaactctccaccccaaatcaacagaatatacattcttctcagcaccacatcgcacttattacattcctcagcaaatgtaaaagaacagaaattataacaaactgtctctcagaccacagtgaaatcaaattagaactcaggattaagaaactcaataccgcacaactccatggaaactgaacaacctgttcctgaatgactactgggtaaataacgaaatgaaggcagaaataaagatgttctttgaaaccagtgagagcaaagacacaacataccagaatctctgggatacatttgaagcagtgtgtagagagaaatttatagcactaaatgcccacaagagaaagcaggaaagatctaaaatcaacaccctaaaatcacaattaaaagaactagagaagcaagagcaaacacattcaaaagctagcagaaggcaacaaataactaagatcagagcagaactgaaggaaatagagacacaaaaaacccttcaaaaaatcagtgaatccaggagctggtttttttttttttaaaagatcaacaaaattgatagactgacagcaagactagtaaagaagaaaagggagaagaatcatatagacgcaataaaaaataataaaagtgatatcaccaccaatcccacagaaatacaaactaccatcagagaatactgtaaacacctctatgcaaataaactagaaaatctagaagaaatggataaattcctggacaaatataccctcccaagactaaaccaggaagaagttgaatccctgaatagaccaatgacaggctctgaaattgaggcaatagttaatagcctaccaaccaaaaaagtccaggaccagacggattcacagccgaattctactagaggtacaaagaggagctggtaccattcgttctgaaactataccaatcaatagaaaaggagggaatcctccctaactcattttatgaggcctgcatcatcctgataccaaagcctggcagagatacaacaaaaaaagagaattttagatcaatatgcctgatgaacatcgatgcaaaaatcctcaataaaatactggcaaaccgaatccagcagcacatcagaaagcttatccatcatgatcaagtgggctttattcctgggatgtgaggctggttcaacatatgcaaatcagtaaatgtaatccatcatataaacagaaccaaagacaaaaaccacatgattatctcaatagatgcagaaaaggcctttgacaaaattcaacagcccttcatgctaaaaactctcagtaaactaggtattgatgggacatatctcaaaatgataagagctatttataacaaacccacagccaatattatactaaatgggcaaagattggaagcattccctttgaaaactggcacaagacagggatgccctctctcaccactcctattcaacatagtgtcggaagttctggccagggtaatcaggcgggagaaagaaagaaagggtattcagttagcgaaagaggaagtcaaattgtccccgtttgcagatgacatgattgtatatttagtaaatcccatcatctcagcccaaaatctccttaaactgataagcaacgtcagcagagtctcaggatacaaaatcagtgtgcaaaaatcacaagcattcctatacaccaataatagacagagagccaaatcatgagtgaactcccattcacaattgcttcaaagagaataaaatacataggaatccaacttacaagggatgtgaaggacctattcaaggagaactacaaaccactgctccaaaaaaaaaaaaaaaaaaaaagacacaaatggaagaacattccatgctcatggataggaagaatcaatattgtgaaaatgcccatactgcccaaggtaatttatagattaaatgccatccccatcaagcaaccaattactttcttcacagaattggaaaaaactactttaaagttcatatagaaccaaaaaagagcctgcattgccaaggcaatcctaagcaaaaagaacaaagctggaggcatcacgctacctgacttcaaactatactacaaggctacagtaacaaaaacagcatggtactggtaccaaaacagcatggttctggtaccaaaacagagatatagaccaatggaacagaacagagccctcagaaataataccacacatctacaaccatctgatctttgacaaacttgacaaaaacaagaaatggggaaaggattccctatttaataaatagcgctgggaaaactggctagccatatgtagaaagctgaaactggatcccttccttacaccttatacaacaattaattccagatggattaaagacttaaatgttagacttaaaaccataaaaatcctagaagaaaacctaggcagtatcattcaggacataggcatgggcaaggacttcatgtctaaaacaccaaaagcaatggcaaaaaaaagccaaaatagacaaatgggatctaattaaactaaagagcttctgcacaggaaaagaaactaccatcacagtgaacaggctacttacagaatgggagaaaatttttgcaatctacctctctgacaaagggctaatatccagaatctacaaagcacttaaagaaatttacaagaaaaaatcaaacaaccccatcaaaaaatgggtgaaggatatgaatagacacttctcaaaagaagacatttatgcagccaacagacacatgaaaaaatgctcatcatcactggtcttcagagaaatgcgaatcaaaaccacaatgagattccatctcataccagttagaatgacaatcattaaaaagtcaggaaacaataggtgctggagaggatgtggagaaatagcacttttacactgttggtgggtctgtaaactagttcaaccattgtggaagacagtgtggtgattcctcaaggatctagaactagaaataccatttgacccagtgatcccattactgggtatactcccaaaggattataaatcatgctgctataaagacacatgcacacatatgtttatggtggcactattcacaatagcaaagacttggaaccaaccaagatgtccatcactgatagactggattaagcaaatgtggcacatatacaccatggaatactatgcagccataaaaaaggatgagttcatgtcctttgtagggacatggatgaagctggaaaccatcattctcagcaaactattgcaaggacagaaaaccaaacactgcatgttctcacttataggtgggaactgaacaatgagaacacttggacacagggtggggagcatcacataccggggcctgtcgtggagtgggggaaggggggaaggatagcattaggagaaatacctgatgtaaattatgagttgatgggtacagcacaccaacatggcacatgtatacatatgtaacaaacctgcacgttgtgcacatgtaccctagaacttaaagtataataaataaatttttaaaaaagaaattagtaaacttaatttttcacctgttacgcctctcttccagtttccaaattcaattattcatattactgcttctacattcagttttataagatttacattttattaaacaaccatcataaccaaaattgttcactttagttctgtatttaaatgcaatcagtagtaactttgaatcattttatataatgactgtgcaatccttaaattctcatattgatatcacagttttctagattttgtcaaccagtagcttttgagagaaatcatatgagtgctatattctaatatctgtgcatatttttaaataccttttaaaaaatatacatgatgataactttactgggtgtaaaacacatgccattttttccccttcaaaactaattgcagcatagttttgttttgtaatttctttgcttgctgtattagtccattcttgcattgctatgaagaaatacttgacactgggtaatttatgaagaaaagaggtttaattggcacatagttctgcaggctgtacgggaagcatgacagtatctgcttctggggaggcctcagggagcttttactcatggtagaaggcaaagcagaagcaggcgtcttacatggccagaacaggaccaagaaagacagaaagctacacacttttaaacaaccatatctcaagagaactcactcactatacagtactaagggggatggtactaaacaattcatgagaaaccaccctcataatccaatcacctcccaccaagccccacctccaacaatggagattaaatttcaacatgagatttgggtgaggacacaaatccaaaccatatcacttgctttgatgtttgttttcttccgatgatagtgttgctaaagtgagtaatcctgaattactatctgatcgctaacaagctagatgccttaataattttttctctgttcttgaaattaaatagttattgcttgttctgcaacaaaatttttctaaagtttggtagtcaattttcatatgtagatttatgaaagtcttcattaatttttttttagaaatggctttttaaaatttgaatatttttgtttggtgttatttttttgaaagcctgtgcactttataggtgactcattttcaggagtatctattcaaacgctcattgcaaatttctccacatttgacatatatacttcaacatctgctctctgaacttgtggcatttttccagttttactgtagacagcctcagattctgaaattttttgtccttttcttctttttattgggttttctggaaaataggcccttttttccacaggcagtctaggactattttcctgaaaattagatataatgaaggataacctaataagagttgttacactcttggggttagtgtaatgtaatagaaaaagcaccagaatgtgagtcagacaagctgaattttaactaggattctgtcacataccagctctgtggccttggttaaatcaccaaatactctgagcctcagtttctttacaaagtttttgtgagaattaaataaagaacctgcatgaaatcatgagtaagttacatgagaagtataaatcagaatgctagcgattatttatttaaaatgaactatggggctaaagaaagtaaggttactacattaaggaactaggaaccagtccttccatcatgctcagctctggttaggcctgtgctcaagttctctgccccatttgtcaattcctgttaatacatgattcattgaaaccttggttgatataaaatattctagtgacttggggatggtgggagataagaagagaagggatttcaaaatatatgttaaataggagttttgctttcaagtatttacctttgaaaatttgaaaataattgaaaataattcagaggagatttatatatatattattaggggttaggaagtagttcttacaccaaacagtaaagaaaaactgatggtatttttctttgaggagaaaagtctgaaagaagatttaatattccattacttgtgatacaatggagattaataaccaaccaagattctttgtctccaataattatagggcaaatgaaaactggctttagttgcatcagtagtaatctccagagagtgaaaacagggtcggacatctttgtaaggaagagtcacccacttgtgatctcagggattgatgccataatttccatatacaaattttatggtttgacaaaaaatattttgtcacccatgaggaggcagtcacccaagaaagagatagtataacaattaaaaatttgagagaatgagttactggagaaggctacgggatactggattcttgaagggggaagaagtttatatcaggtagaggggaaagattcaacatatggagtccaggggcccatctacccctccattttattgagatccaaccctcagtaggagctactagccactgactggctattgactgagatgatataatcacctttcggcacactttaaaagctgaacaaataatttacaggtatcttacattatttcccaaacttcctgacaaccatttagtatggtggctacatcaaaatggtttgagcaagcactgctccagatagtcctagaatcacagcttcagaatcacctgggagcttgtcagaaatgaaaattcatgggcaccacctagacctgctaaattagtgtctctgcaaatggagtcccagcattctgtgtttccatatgctctccagatgagttttatgcatgataaagtttgaaaaaccactgatattgattactctttacttgtgaagaatatatatgagcttcttgtatttatttttcgactcaacatatacccatgtgcaaacaaccaaaaagcagagtaaaatggggttttgcattatccgtcgatttttctatttttgagccaatctcttaatagcatttattagagtcacttttgccatacaatagattgccaagatcatgattaagaagcttattaaaatgaatttaaaatgtttaaatggaaacgacctggagatgtaattgccaaaatttaatcaagcatttaatttgtagctcataccagccaaatggattttcctttttttcagttccctgtttgtacaaggaaattaaaaagtatggaatcacaggccaagcagtgaacccttgatactgcagtgtgctcacttactctcattagccgtattatatcatcctactcctttggaattttagtttcccaagccagtctagaggatagataacaattgactgtatatatacacaatgggtgagttaatatgctttagcaataatttatactacttgactgtatatatatatatatatattatacatagtgttataaattactgctaaaacatattgactcaccccatcagcattaataaaataggctaaatattctgatcttaattctgcttgtttaaaattcccttgttttagcatgcctgtctagctgcccttaaattgctaaactggggagaagtgtgatttagaattggaacatatttcatgtgaatttgatgatggccaccgctgataaaatacctttgtgttgcctcttccattctgccagtgataataggttttcactgagctctttgcacttgttttacaaaggctcaagccttgaatactttgtgcctcacagtatccatcatttagactctgaaatccccagtgtcgatttgacagaacagtcgtttatcagccacggtttgccaagtcagcattaatgcctatgtggcctgaggaaaaaaataaataagatcagtgatgttctaatcaagctcagacaaacatgtttttatacttgcatttgagtgatgttttgcctaacagaagtgctgggttaagatacattaacttgggtcccattctattctctcttgctctggatgtgatgagcatagcgagttctaagcaaaatagtgcgtgtttttctcctctgagtagagttttgttggcatttcctaacgcttctttatgaaaaagaaaatcaagactttccagtaacaagtcattctatctaatttcacttggtgcaaacagtgactgaaatatttcttgattttaattagaagaaagcaagagaaagacagaccacaagagtttcatgaagagataggcatatattgtaaaatttccctaacattttattataaaattcccaaatacaatcaaagatgaaaaggagtttacagtgagctcactgccttaactctacaatgaaccttttactattcttgttttattatatgcccgtcactctttcattcatcctatttttttcaataaggcatctattacaggtatcagtacacttcacttctaaacattcagcatgtatatcatcaactagagttcaatgtttctatttttcctcttttaggatggaatttcaatacaatgaaatacaggaatcttaagtatgctgtttaatgagctttaccaaatgtatttacctgtgtaacttaaaaccctattggagaaataacattgctgtcaccctggaaattaattcatgtatgtatgtctgcattgatgcatacatactgctagacctctgatacttttcttaatttaataaagagagtccactagtacattacagggtagctgtgggggctgacatgttcatctctctgctatctttctctactctcttaatgaaaattacattctgctcagcctacttgttggcctatatatcctgcacttactgaatgatttcttaaatgttcttcatgaaatgtttcattaaaattagtgtaagaatgaaaaaaatgtacaaagagaaagctaatcagcttcttctcctaccaacacctccaacataagtaaatagcctcatgctgactgatctataactttatttttttttcttcagcttttattttaagttaatgggtacatgtgcagcatgtgcaggtttgttacgtaggtaaatgtgtgctctggtggtttggatcacatattatcccatcacccaagtattaagcccagcatccattagctagtcttccttatgctctccatcccccacacaatccccccagacaggccccagtgtgtattgttcccccttccatgtgtccatgtgttcaatcattcagctcccacttgtaagtgagaacacacagtgtttggttttctgttcccgcgttagtttgctgaggataatggctttcaaccccatccatgtccctgcaaaggacatgatcttcttcctttttatggttgcatagtattccatggtgtatatgtaccacattttctttatccagtctatcattgatgggcatttgggttgattccatgtctttgctgttgagaatagtgctgcaatgaacacatgcatgcatgtatctttataataaaatgatttatatttctttgggtatatacccagtaatgaaattgctgggcaaatggtacttctgcctctaggtctttgaggaaccaccatactgtcttccacaatggttgaactaaaatttgcacttccaccaacaatttaaaagcattcctttttatctacaacctcaccagcatctgtcattttttgacttgttaataacagccattctgactggtgtgagatagcatctcaatggatccacaactttctttgtgctcaccaatcttacgaaaggatggcttgatgcaggaaggcaattagatgtttgtttgtttgtttgttttgagtcggagtctcgctctgatgccaggctggagcgcaatggtgccatcttggctcactgtaacctcctactccctggttcaagtggttctcttgcctcagcctcctgagtagctgggattacaggcacacgccaccatgtccaggtaattttttgtttgtttgtttgttttagtagagacgggtttcaccatgttggccaggatggtctccgtctcctgacctcatgatccgccggccttggcctcccaaagtgcggggatgacaggcatgaaccaccatgcccggctagatgctagtttttaaacaagctctgattcattgataatgatttttggctgcttggggtgctgtgttaggaaggatcctgtctatacttagtggaagagtaccaagatttcttacagtttttgccacaggcaggagttgaaactggaaagcaagggagtgggtggcattcctttcccattgtaggtttggggagcgaactgctgcacctggcaactgaaagggccagaagggcacagagtaccactctataacatttctattctggttcatttttgtgtcctattaaaacagctaatgtttctctgcaacagtgctattcacaaaaaggctgtccaagtagggtttggatacacaaagtaggaaagagagagagagaaggagatagattggcagaaactagcatattctatcattctaagaatgcaaacgtgtcaccatttgccttaaagctgatatactctaggaattactcttcctatgcaaagtgtacaattctaagtgtttaagtatttggatcactgttactgtgggataataatgtccagttcaacttcactgcttttctcagagaggcaaatagatactgggtcagtcaagattattcttagtgtgtcgggggcagaatggtggggtgaaaaatcaagctttgctttcattttttactacccggcttcctacataacacttcagcagatgtcaagaccatttgtttggttcctcatagcctccatgtgatctttctcttcactgcagtgttccccaggtgtgagttgctttgctcaagatcattttcaatgactcaattttcaaagcaaatgtacacacaagacagtagtattttcaaaaacacaggttatcacattttccaagggggatagacaagagaagggaggatgccgagaatagagtgtgagtttatttcacatagcaggtctcataaagattgcatccataaatgtgctgccaaattgaacaatagcagtggggaataaaggggaggagggaagagaggactcagatgaaggcaaagagaaaaaacaactttaggaaagtgtgaagtttaaggagacatgcctataacactggctttctacccagtctcatgctaactcctggctagaaatatatagggacacagacacacacacacacaaacacaccacctccttgaaggaagaaacattttatttaatcaggattgctaaggaatgttgctgctgataaggcgacagaaaatatttctgggagtgcattttcggaacttgggaacagagacagtctgtctgaacccagctcaacttttctttcttatcactttttaaaagcatgttatctttaagagccaaattaacttttcatgatatggtttctcagcagctgacacttgggcattacagggctggacaggaatgactaagcagttttgtaaaatgactatccccagagctgctggcttgctggttttggtgtcaatcatatatttaggatcttttttcctgtctagatttatgtagctctttaagaatagaattgcttggtccaggaaaggtgtgactagtataataaacaaaagaagccacagaggatattcttgtgagaaaccaattaattattcacaccaatatgttataagtacagttcattttctcttttgactattgcattacaaagaattttctcaatgcattcaggagatataattaataataccctaaacagtaattttaatagttatggtgttgtactgggaggcctatcaactaaaattcaaaaataaaataaacacagtccctacttttaggaagacaagagtcactgtatttaaatttttacttttgatgtctttattatttgtggacactctgaaaaacataaaatgtcatattataacagactttaatgttttaaaataagtgggattttcaaaaacacacagttctggaaaggtgtatttctttatgtacctatctatatgataagaagttttaccacatggctgtatcatttatggaatcaattaaaaccaactgtggtggtaaaaaaataacctctagtggacttattcaactgtatatggaattttatttagggagttatggaatgaatagtttttttccctgaaagcattgttttgttagttttctgattgtttgatagatagacataaaaattttccttataagtccttggatataattttacttttcacatatgattgatcccttctatttattttgccatcagaaaccaattttttaacattgcatattatccagaatttgaatgtcacaaaattcaaacaggtaaaatgtaaggtttgttatgtacacacacacacacacacacacacacacacacacacagacacatacactgagctaaagaggatggtctttgtgtacagaaaaggataacattttttccctttagtatgtttattgatgaacacaaacagaattctgtttggtttatgttgcatgttttattgtttctttttttagattttaattttcctgttactatgtgtgtatgtgtgtaagtataagttttatatttttcaggggtaaaacagtttccggtaaacaatttttttgttttgctttgttttgttttgttttgttttgagacggagtcttgctctgtcacccaggcgggagtgcagtggcgcgatctcggctcactgcaagctccgcctcccgggttcacaccattctcctgcctcagcctcccgagtagctgggactacaggcgcccgccaccacgcccagctaatttttttttgtatttttagtagagatggggtttcaccatgttagccaggatggtctccatctcctgacctcgtgatccgcccgcctcgacctcccaaagtgctggcattacaggcgcgagctgcagcgcccagcccggtaaacattttttttatagagggagttttaatacgttctgtattagtttctctgttttttcatttgtatatttgatgtgatactcaagttgctatttaagctctattctacctttttttgtcccatgggagtccattccatcctctaaaaaagggaagaacatcagttctttagccattacttggtgcaaaacaagttccggtttcctccttccctcaggtgtggataagagcagaaaagtagatacacaaagaggtatatacttattagaaagaaatcacttgcttaaacaataggcaggaactgtgcgactcgacctggaacaaataggcataaataagcaggaaaatgtaatatttgtttgagagcttgaaatgcagtcttttaggacatatctaggacatccctgcatcatcactttggtaagaacttcagtaccttgcctgccagtcatttatatgcacgttccgtcacagttagtcccacctctccccacaccttctgcaccactgctgccaccaccatcactgtgcctggcagctgggtgaatcaggaagacttctaacgttagttttcccatatttaccaacaagtcttccaaagtgggcccaaattaaagttgtgtaacaacatcgctttccctctctggatcttcattactggagatggaggcaagcactttactatggtaagcacttttgaccttagacaggtggcctaaaaggtgggtaccaactagcctttaggacatattcaggagggcttctataccaagactctctggccaacgtaggctaacagttcttttcccttgagttttcatttgcttcatcttaaccatatctctattactctaatcagtacattctaataaaattacttgtatgtctctcagtaaaaatatggtcttcttgagtccccccatttcaaaattattttattagatctttttaggcttactgtgtctctgaagggcttggtgtatattcattgtttgatagcatatcatggacagttctgatattttaaacaaaaaataggccgggcatggtggctcatgcctgtaattccaacattttggggaagatgaaataggagaattgcttgaggccaggagtttaagaccagcctgggtatcataagagaccccatctctgtaaaaaataaaattaaaaagccagatgtgattgcatgccccactagtcccagctactagagacgctgaagccagagggttgcttgagtgcaggagttctaaattacagtgggctgtgatcacactctatcctggaccacacagaaaaaccctgtctgtaaaaaaaattcaaaaacaaataattacaaagaataggaaattaattaaatataagaaccaatgattgcttacattttcatacgtctttccttattttcctttatcttggtacatataaactctaaaataataggatataacttaacaaatgtttattgtttatttttttcttcaatttctatgtgtaacaaaaccttaggattgtcagaaataaagtcattattttgtttaaggaggagggtcctgctagccttagtaaacatagcccttatctttcttctctaagataaaatggcaggtactggctagatgctgcactctacaagtatatcatcagttttgttttgctttcagactagtactaggaaagaatgaggtcatgcattttgaaagtgggtttttgtgggttttctttatgtgtggtttctttttgagtcagataagtttttttccttccttttcaggtcacacttatacttttatgcaaaatattctaagttgtgtcaactgaggacatggctacagataatagaagtgattttaaaagccacttaacataaaaggattgttccaatttcccagaacagccaggtttctgtttaatccaacccctttagaatatagcttatatctctgatgttcaaagccatgtgttcgtcttgaaataatcaaaacaatagaatcctcaaagaatccagtgcataggcaacatgtattatgttatttagttagttttgacaaggttatctaggcagttaaacattattatctacaggatttctttttccttcaacatgaagacattaagttcagatttgtagagcagagaatatctgtttcatatttgacacaagctatctcaatttaatccccattttccttcattagacaagcgaagctaattattttgagaaatgaatgataaataactactgataattagacacaaaggttttcggggtatgctgtgttggttcatatagggaatgttcataaaacattataacagcaaaaacattaatttgaagaaaaaatttggacccttcaaattttgctttcctgttttcccatttccatatgctgagaagataccaatattttcacaattgtgacttgctagacataagttacgagggataataaaataatatcctacctattagttgtagcaactagcttcaaggggattattagacccatgaactgaagtcaagtagtatagaatgataattacatttattacagtatgcccagattatagatattttgatatgtcttgccacaaaggacaccagagtcatattatgtttcagtggtactagaggaagctgcacgaataattaccgttagtttcatggaacatctaaactgatattattttcacccagctctactccaattgcaaattgcttttcccaaagcaagagctagctttctcatctttctgcttgatgaaggtaagttattcagccctgatttgccttttcttctcttctcttacctcctgttattcttagccagtaccacatcctgaaacaatgaccaatcttccaatgcttttatgtgcattgatttcctatccccattttcttgagggtagagagattatttgcctttgcagtgatccaaaaaatacttatcgcaagttgaagagcttaatgcactcttgttaatagttattttgtcagtttagaagagggcaaagacaggggacagtttctatccacaaactataatccttctaaagacttcatacactctcatcatccacatctttctggaagagggtagatcccacattgtgaatttaacctctggtttagtatataaatttgtttttcgttttgattaatgtaaatagtcacatcaggcacaaaagttacaggatttttttttttttttttttttttttttttttttttttgagatggagtcttgctctgtcaccaggctggagtgcaatggtgtggtctcagctcactgcaacctccgcctcccaggttcaagcaattctctcacatcagcctcctaagtaactgggactacaagcggatgccatcacaccaagctgatttttgtatttttagtatagacagggtttcactctgttggccaggctggtctcgaactcctgacctcgtgatccactcacctcagcctcccaaagtgctgggattacaggtgtgaaccactgtgcctggcctaggatatttcttgctaaagactgatggagagattttttcttaaaaaggaaatcagagaggtgggaatttgtgaagagattatgatttggcctttgcataggacaacttcacgatgctgttatctactaaacctgtaccaaaattcctagggctaatcatttaaaaaaatacacatctatatctatttctatgtacctatttctatatacctatatagaaatagatatagatatagatatagatatagatatattggcttcttgcttcctttagagcttgtatatttcatcaaagtaatttttttaaagataaactgctttagaaatttaaacttatttattataatgcttcttggatattatccttgccttaaattaagcaaaattcataatttcataaaaagatctacatcttttttctgtcattaattatgtgctccccatacccataaagaattaaataaaaattatttgactctttttctttattcattttttaaagtacataaatgtacttatgaaaatatgtggttttaagcttaattttgtgacatacattttgaatatttaaaattgggctgacaaagcagtagatattctcaggagtttaattttacttgtatggcaagagttgataatttgtgagttttacagtattttattagagaaagtttaccagggaagcagagtggaaaatatataaaaatgtattctaaacctgcaaaataaagccctagatagaatttgtttacatgtactgattaattagaaggcttgctttgtaaggaagcactatgcaaattattttttctcagttattagtctaagaaagagacaaaaataacttttattacaaagaaatctctgcttgcatccatattttacatctttataaaaatgttttaaaagagaggtatggccaggagcagtggctcatgcatgtaatcccaacactttgggaggctgaggcataaggttcacttaaggccaggagtttgagaccagattcagcaacatagcaagatcctatctctaccaaaaaaaaaaaaaaaaaaaaaaaaaaaaaaaaaaaaaagtgaaagaaagggagatgctattactgtttctttcataatctagctactggctaaccaaaagaaatgaaacattgctgaaggtattgattttctggtatatgtggaaagtatacattttattaatcacatatctcacaatatatagaataatataaattatatttataagagatcaatagagatttttgagagaaagtaaaatgacatatctggccaggcgtggtggctcatgcctataatcacagcactttggaagcccgaagtgggaggattgcttgagcccaggagtttaagaccagcctgggcaacatggtgagatcttgtgtctacaaaaaattcaaaaattagctggacgtggtggcatgtgcctgtggtcccaggtacttgggaagttgaagaaggaggattgcttgagcccaggagtttgaggcttcagtgagctgtgttcttgacagaatgagaccctgtctcaaaaaaatgaaaaacaaatgatatatgtatatttttaaatttttctgttataactgattcaaattgttcttcacctctaatcaattatctctaatcaattatgtttctttgtgataactttgaaatgggttatatattttcatgactcagttttgacagtattcaagtgctaaattgaatctctacattcatgttgccaagagttttgaaagtaattgttgttagttagtatacttatcagaaattttagaggcccagaattctctttcaagttctgtgctttccataccagtattttagttttgcatttttgttttgcctaaacagtttgaactttgtgctctgtcataaactcctacttttacttttctgctttttgctacaatttgtttatttggactagtgttaatttatcacctagaaaagaatgttattttaggaatttttgtatcagtttaactcatggaactgaaaatctgtctcatgtctcagtgcaaaagaatgggaatatattttagatttcataattagcatgtgcttaagagggtttttatattctttgtgtgcaatgcttagcaaggtttatacatgtttggaggattaggtacacctagaaaatataatctaccagagggagttctattatcttatggttttcagcaagtttaactccatggaattgcagacagaaagagatattgtataaatatgccagtcatattttgacatcgcagtcttgtattgacactttcatcaaactgtgggagaacagagcatttcttgaggtataagttcttgtaagtattttgcagaacaaaagttttctcttctatttgtactaaatcttctaggccacaaagcgtcaagaagaaaattgactaaataattatgggttctgtaccttctcccagaatacttacccttgacctgaggaataactttccttcatggtaagattgacccaaaatatggcttgaaatgaactttctctgctctagtattaagaaataatagcacacactcttggtacttctcttttcatgacttgttcgtgggtttctgtcaacatcaataaagtggttctttgtaatagccaatcatttgtttaatgcatgcctcatttctactcatcttagaaagaaaagtcaagaagtcccacagaaatgccccaaaggaaaaaataaaataaaacaaaatggcttaattcatgacacttgtgatttattgagtcttctttcatctgtcatgtaagatgtacaagcaccaggttcaatttttatttttggttggtttctctgacagagactcataattctgccctagagttaaatcttatggaaaaaaacactgaaaataaatagcacgtttcttcctctagatgccatcttttctctgtcacataacaatgcggatttgctcccaatagtttatgtgcatagctttcaaatctaacactggtagcaatcaaacaagttaagtataaatcttatttatgtgtgacccttctctctctctctctctattttttttttttttttttgagatggagtatccctctgtcgcccaggctggagtgcaatggcacaatctcagctcactgcaacctctgcctcctgggatctcggctcactgcaacctttgcctcctggattcaagcaattctcctgcctcagcctcccaagtagctgggattacagatgcctgccactatgccaagctaacttttgtatttttagtagagatggggtttcaccatgttggtcagtgtggtctcaaactcctaacctcaggtgatccacctgccttggcctcccaaagtgctaggattacaggtgtgagccaccgcgcccgacctctatattttttaaatgcctcatgtttccattttaacttgatcttgcatatataaccatttaaccaagcttgctaagacttaaagaggtataattttagcttgtcaatattcattgttttgagccctgtttataatgaagtataacaataagcattattatgctttagtgagttgaacttgaatatgcttgagtgacctgacttgctcacattaaaaacggaacaacagaaccgtagaaaaagtggagtaatctcaagattttcttgtaaacgttacattaagagactttatttgacaacctaatcaaaaaactgaccatgtgttttcctcttcccatcattttctcagattccctttctatcattttctctcccatcatttatcctcatgatccatagcgattgcaaagcacatcgcaaatgtgaatagctatattgttcctgcatgatagtaatgagtatactgctacctccaaaggggctgaaagttaagataggtcttttacaaagcaggaaacataaccttaagcataattataaattatatatataatcatgctctcttttctttaggataagtgattagtgttcaagtttagtgcttatatttgctttaaaaatgtacattgtgctcatttatgttttggtacggacagatcctttatatgaccactgtgctaaatatttttttaaatcactgactagacatcctgatttatgtgtctagatttatatttccagaaacatacactgtaacttattctgtttaatggctaagacacttctgcataatttacattgagactaaagtggttttttactgagatacttttctctatgacaaaccaacattatgatatctgatagaaatacaacactcttctttacattttttccccaaattttagaatgaattaaagacaaatacccatcagaaaacattccttgaaaatgcataattgtgatgtgtgatgctgtacagagcaaattcagactaatacatagacctcaaattcatgactataattttctctggatagttagaaagatattttaaggtgtttcatgcctgaggaataatgtcattattgaatgcatatacatacatggatgcctctgaggatgtcctatatctaataaacagcccaagtcatgggcaaatatatatcttataaacagggggatgggaaaagcatgccaatttatttctattgagctaaaatttagggtccacatttatttattgactatgatcttgggtaaatgactgagttttcttgtgtctcagtttacttatttgtaaaataaatcatgttacttcaaaagattattgcaaagattaactactattagcatataagaaagcttaacatactttattcatacagtcattcttcagtttcataaatgtgcccttctcggtagagaaatgggtaacatcagtgaactaggttgagaccgaagctgtacataatgataatttcaatgatttgatcaataatttcagattgatttttgttcatcctaagacaaaactttgaattctctatcttttctgtttgtcccctcttagctaggttggaaatactactcttgttttgttctttaaaggcaaatagtaaaatgtttatccattatttttcaaacactgattactgtagacagtgtcaacatgatcagtgtttgagttttaaagcaatagttgaatcaagttgcttcacagtggtttcttcaaaataccacaaaatgacaggaacacttacgcagtgaacacttggatttgcttcttgatccttggtatttgaaacatgtatggaatgcatcctctgtgtcagccaagacagcctctggagagtgaggcaggtttgtgtgttgagggaagggggtgtgcaagggggtggccatggctacattagttgcctctgcttctgatatctgtttttcattacattttgatagattatgtcatctttttgtcacatacattttcacccaagtctggaactatatttctctttcatttccaacttacatcctcaaaatcattcatggaagcctttgtctatataacaaatttctctactattttgagggaacatgtcctattgtagaaagataaaccttttacaattgttcgtcataagaggaaatctgctttaaaaatatttcatagggctgtcttactcttattcctaaaaaaagttattactgtagaactagttagcaagagttactctgttctgggttacttgggattcactgttagcaaagactaacaattagtttgtatatccgtatatggatgtaggtggtcacagtaatttcctgcttgattttttttgaattccaattaatataggaagtttctgaatttctaggtatttcaggatttgcatatacttagagttcaattatgttttaaacacattatctgtgcaagtgactgtcctaaatgttgtggctaaagaggaggaagcataaaaaaataaaaaaaattaaaaactgttcttacccatctcccaccccagccccaaattttaaaatctagcaaagtaaaaagctgcatgcaaatttttttttaaaaaaaaaatacaaggcagattgttttatattcatgtaacaattgtcaggcacaggagcctaagcagacacattcctggtgtggttattcataacttagctaagcaatgtctgctatttatcactgcacttataggctggtgagagtctctcattgcccactgctgagtcactcaccttttcattttgaaagcaagtttggccattttttttaaacaacacttttgctcaaataacatgaaaaattccaagtccctttggagttttactcttactactactgtagcagtttgttcatattaggatctcgcagactatctagaagcaatgaattattatctagtcttgcaaagatctagtataagaaaggataaataaaactaacaaattttaaaatggtatgaattcaggttttgtgactttttccttattaataaaaaaggattagtgatactaatgctactggatttgtagaaaggttaaatgtaagaatatggacaattggttggagacatggtaggcattccacaaatgtaagctcactgcgaacttcttagaactctgtgtagagtatgtattcctatgtttgttgaggaggggcattttagttaatatatagatcctacttttaattattattttcactctttaaatgttagttcttcacttctagagttgttattctgttggcttctcattttttcccctttttttcttccaagtgcaaaattttaagtgaaatctcaggcagccctcatttaacaatttcatgtgaaaaaataaccattgtgaactctcagagtagtaattacaggaagttatgaaactttgctaacttttactaacagataaagcattttcttttgattgttaggaaatcgtgtgtggacagcacgggagaacacactctgcctgtacacattgccaactcttgcttcattgagtttcacaaacaatcccaagcttaattttagccaaaaatgtaaaccagttcccacagtaaaagttgtgctaatttccaagttgatttttatttctttttcattcctctgttgtttgaactggtcaaattgagcagtgagatggccaagggacaaagggtaaggccaggggggtcactaaaccaagaccaggctctaggatttcaatgtttctttcttctttcttgccgtcagtaaagatcccctaggcattgacattttaaaaactctccatgtcttctgttaactcccttaggatcctgatctctgtaacaaagatggatggtgacacttaattatggacactcacaggcatccaattcaagcaatcctggcttccaagcccagatctgccccttactagcagtgtgacttcacgtgagttaggctctcagtttttttcatctttaaaatggggattatatttcctgattatagtagctgattataatacagattatggtgccaatctcagaggtaagataaatgcacttagcatacaacatagaacacagtaagtgctgaataaatggtacctgccattattattgcaagctaattaaaaacgatcatttgtactaaattatgttttattcaaggaaggtaatgtcattcctcaccaattaatcatttgttgatgaaaggcccttgagtagcaatgtcacacactgtatgagaactggaaaggatagatcttttgttacatcagccaccctgtctcatagatgactgctggctcctcttttctgcacgaaggccagaacatgaaaagttagatatttataaaattgctcaattcataatatttgagagttgatgataatttctgttttagctcttgctccccaaggagcagatgcttctggggaggttcaggagcacgtgaagaaacaacactgatagatggcgatcgggacaagagcaccttattaattcagctaccactgtgggtgactgcaggtcaataccctagggcaactccaagagccagtgtagggtacacatcttagagtcatcatacacaaggggtgagggagctaggttatttatacaccaacccctgattgactagtaaaatgtctcccctggtcgtttgggttttttttaatttttaatttttgtaggtacccctagtagttgtgatttctccaaaacttctaacttgctacaaaggaggacaacagagattatccagccagagaagttcttacataaagaaatgcagggcctgtgtgctcagcatggtaaggacaaggtaatataaacaggcacaaaaagcatttgtttttatttcttatacagtaatatggatctaagtttgggaaaattttaatggaatcttcctgaacatatattcttaatgatacaattggtttatattaaaatttgctattgaaacaaatgtagttttggtaaagaaaagctatcatatacctatggaattttagacaacttcctccaaaccattaatctttgcacacttgcttcttaatgagcccatttgcacaatcctatttatcattttacttacatgcttgtccatctctctgaaacgttgggggaacatgaccagaacttcacccggtttacttttctttccattgtttaatccacctatctgagctaccttgtttaccaatgttacccatgaactgacaggagtttattttaatctaatattctgcttttcaaaggaagaaacttattacagtttgaatgtatcttgtccaaaatgcctgggaccagaagtgtttcagatgttgaatttctttggatttttgaatatttgcatatatgcaatgagatattctgggtatgggacccatgtctaaacacagagtttgtttatgtttcatatataccttatatacataatctgaaggtaattttatacactatttgaaagtaattttgggcatgaaacaaagttgcgactgttttttctgcgacccaccacataagatcagatgtggaattttgcagttgtgcatcattttagcgctcaaaaaatttctgattttggagcattgtggatttcagattttttatttagagttgcctaatctgtatacaaaaactttaagtactctcctgcctgatatgcttagtagtgcattcatctgcagattctaccaacttctgtccttttgttatactgctgataatcattattcctctgacatattccacgtgcacctgtcttaacaactaagggggaaaagcaacacaaaaatcttcatacttggtgcttcattttatgtgagctccctgaagggacaggcttgtggctgtgcctacattccagtgaaattaatgctccttcttcagactactgttattctatttatagccacaggacttcaattttataagagtccagaaagttctgagtaatgcacagaattctacatacacagcaaatgcagccatggcaaaatgtagtccctggtgagggaggcaaacagagaatcaacaatcctttgcttttattggaataataaaaccggagcagtttgtgtctgaatgtgctgtaaaccagattttttttttcatgtaaattctatagccaggatatcacagacattgccatgaaagtggtaaatggagaaatacagtctttggaggaatcttgacttctcagcactctttgtttattcatttaaatgtgcctatttttatggatggtgggtcaagatggcggattcaatgaaatagtatttcataacaaaatgagcatgaagagaatttgggcatgtctaccaaaacacgaaggacaagtgagtacaatcatatattgttaccatctcccaagtcttctcatttgctttttttaaagtattgaaaattctggaaagactctgtgtggactatgctattcttaatgtttattaaggagaggacactttacataatttatagagcttatttttaattattgttttgacccattggatgtaattacacattttttgttgtacgaaaaatttatataattaatactaccatattaaagactattataaaatatttatcaccatttattagactaatggtagcatactattcacttttattcacccagctttcttcacataacaacatatcttggtgctcctttataataacaaatgtaaacattttcgacaaatacataaagttccattttgtgaatacttcacagtttaataaaccatttcccaattgataggcaattggctttgttatgaaatactatcctagtgaagaggcttaaacatacacaaaaaatctttcaataagtaccttcttgaaagaaggtttcaaatgtagagctattttcatttttttgagatgaagtaccactctgttgcccaagctggagtgcagtgtcacaatctcagctcactgcaactccgctttccaggttcaagcaattctcctgcctcggtctccgaagtagctgggactacaggcaaatggcgccaaacccagctaatttttgtattttaaagtagagtcagggtttcatttggccaggctagtctcgaactcctgacctcaggtaatccacctgtcttggcctccctaagtgctggtattacaggcgtgagccaccgtgcctgtcctgtggagctattttctaatggctaaaattcagaatttgcaaaaatgaaaatgaaaatcaactataattttaccaatttattattaactctttccagcttttgttctgtttgcacatacaactctaaaagcgtaggaaattaggatgtatgtaactcatgtagcctttttttctcagttaacattgtgacgtaagtattacctatgtcaaaaataattctctataaacatgattttagtgtccgcatagtatggtaatattataattaaccacttatccataacgtacagacatattacacccccatacatattgctatattacatataagggaagatatactgatttgtacactaaaccacagtgcacatgtacctacattacctgtctgtgtaacctccttcagattatgattcagtaggtctgaggcaggacaagaaagccactgccacttatccttggatgaaacctcaaatagcaggggtataaaggatgatgatggcctattattttattttacttcctttaagactgaacaaagggactggatttgtcatatttaaattagatgcattggcaccctagtagttatatttattgaactctctaagagactttctaaggtagatgctcggtttaggctattttggccacatcccaaataaagtcacaatactggactatgtgatctctggatatccttttttctgaatcctttgattccaggaacacttttctctcacttttcagtatctgccagtagatctattatagatgtgttacagttaaacatcaaaatatggtggctctttgctgtgataagctagagagtaataatttattagtcaagacaggaatagtatggagttctttttcagtctcttccatatgttgcagaattaacgccaaactgtgtacggtctgaatcctttccattgaggcaggttgtagaacatgagcttatgaggctccagaattttcctggaatacatctttcctacatctcttgtagagctcatgttcccaaagtaatcattatacaaatactcagctggctggctctaggaatccaagtataaatagcaaattttacttgctctcaagggcctttgagtttaatagatcagacaggcaagaaaattggtaattatagaacatgtatggtaagtactatagtaagatatgaataggtgcaaaagagggaatcctaactcaattatttcagactttttttttttttcaggaaagtgaagacaagctataattagccaaggaaagtaatggggagttaggggagaagggaatatttttcaggaaagcttagaggttcaaaaaggatagaggaatttaaaaaaagagaaattagagagctgcaagtaatctggttagaggacacacgagggagattataagcatgtgtgtgtgttcgtgtgcatgtgtacacgtatacgttggagattggacattgcgctttttagaaaggtgaagaagttggaaaggtaagaaagggcctggacttgaagggctttgttaggctagctaaaccatttgaaattaattctgagaacaatgaagaactgtttaaaagttttaagtagtactctgcccgccttggcctcccaggagttcgagaccagcctggccaacatggtgaaacccagtctctactaaaaatacaaaaattagccggacgtggtggcgggctcctgtaatcccagctacttggaaggctgaggcaggcgaattgcttgaacctgggaggcagaggttgcagtgagctgagatcgcgccattgcactccagcctgggcaataagagcgagactctgtctcaaaagaaaaaaaaaaagaaaaaaagttttaagtagtgaatgttacctccgtaaaaaacaagctaggaaccagaatgtaagagctcactcactgcagtctagagaatgactgtttggtggcccatggtgagaggtaacagcctgctggcagccctcgctcgccctcggtgcctcctcagcctcagggcccactctggccgtgcttgaggagcccttcagcctgctgctgcactatgggagcccctctctgggctggcagaggtcggagccagctccctctgcttgtaaggaggtgtggagggagaggcgcaggtgggaactggggctgcgcgcgtcgttcacggccctgtgtgagttctgggtgggcgtgggctgggcgggcccgcactcggagaggctggccggcgccaccggccttgggcagtgagagttaggcgggccagcagctgcggagggtgcacctggtcctctagcagtgccggcccactggcactgcgctggaattctcaccgggcctcagctgtctcccagcggggcagggcttgggacctgaagcctgcgcgcagccggagtctcaccgaggagccccaccccctgctccacggcgccgcccggtcccatcgaccgcccaaaggctgaggagtgcaggccctcggtgtgggactggtgggcagctctgcccgcggccgtggcgcgggatccactaaggaaagccagctgggttcctgagtccagtggggacttggagaacttttatgtctagctaaaggtttgtaaatatgccaatcagcactctgtgtctagctcaaggtttgtaaacacaccaatcagcaccctgtgtctagctcaaggtttgtaaatgcaccaatcagtgctgtgtgtctagctaatctagtgggacttggagaacctttatgtctagctaaaggattgtaaatccaccaatcagcaccctgtgtctagctcaaggtttgtaaatgcaccaatcagtgctctgtgtctagctaatctagtgtggacttggagaacttttgtgtctagctcagggattgtaaacacaccaatcagcaccctgtcaaaacagaccaatcagctctctgttaaacagaccaatcaggtctctgtaaaatggaccaatcagcaggatgtgggtggggccagataagggaatgaaaggctgccagagctggcagtggcaacccgccggggtcctctttcactctgtggaagctttgttcttttgctctttgcaataagtcactgctgctcactttttgagtccacaccatctttatgagctgtaactcaccacaaaggtctgcagcttcattcctgaggccagcgagaccacaaacccaccaggaggaatgaacaactctggataggaggaatgaacaactctggatgagaggaacgaacaactccagatgcaccgcctcaagagctgtaacactcaccgtgaaggtctgcagttttactcctgaagccagcgagaccacgaacccaccagaaggaagaaactccgaacacgtccgaacgtcagaaggaacaaactctggacacaccacctttaagaactgtaacactcaccgcgagggtccgcggcttcattcttgaagtcagtgagaccaagaacccaccaattccggacacaataggaagctgaaaagattgttggaagccctagagtggttaatgatgactaactttcgttaagtgttcatgttagcactagatgatattattagatgtatctaatactgatgcagacgatgttttgagctatttcaaatattacttaactttcaaagcagctattttaggtgtgattgtttattacaataattctcacttacatttaagtacaatgaaacacaggcataattgcattacatttccgaagccatagaactagggagttgtaaaagtttgtagtttgtttcgagggtccactcacttcactacggagctgtactgtcttctccatggaaactatgatgaagacagtaggtataaaccttttgcttgaagttgattgacatatgtacatgtgttaattcaatgtgtggggaagaacttggctgaaagtctagtgaaattgtaagaaaacattgtctataggaaacaatttgaagagatcggttgccagaaacaacttaatgaatgctatttaaggagaacatctgaatatcagatgggaactattacggttgggaactttctatcttagtacatgtaggttcacatgtgctaacatatctgcaatgcccagagtatttgtacaagtagtaggtctaaagttctaccctggtagtgccatgttataacaaagtattttttattatctttccatttctatcaagttaattgctattgaagtaggtgcaaactcacctgattagaatggatttagaagatttagagccaaaattgatgattcccattcttattgtgaaagacctgtaaaatctttaaatattcatttaatccagggatccccaaccctacaggttgtgttacaaatgggccacacaggtaggaactgggccgcacggctggagatgagtgctgggcgagtgaatgaagctttcatctgtatttacagctgctcccaatcacccacattatcgcctgcactccctcctgtcagatcagtggcaccatttgattctcataggagcatgaaccctgttgtgaactgcacatgcaagaggtctaggttgtgtgttccttatgagaatctaatgtctgatgatctgtcactgtctctcatcaaccccagattggactgtctagttgcaggaaaacaagctcagggctcccattgattctacattagagtgagtcatataattattttattatatattacaatgtaatagaaataaactgcacaataaacgtaatgcgcttgaatcatcccaaaaccatctccccacacaggttcatggaaaaattgtcttccacaaaactggtccctggtgccgtaaaggttggggacccctgatttaatctttgcttctatttcaattacttaaaaatgaatcaaacacatgtgtgtattccagaaagagattggtatataaagaaggtttcattggataagtgtttccagtgttgaaatacagatgcattttggcccttacacatttccatttaaatgtctagttattttttaaagataaaaacaaccttccaggagcaagagaagcaactcatttctatccaattgggcaaatcacttaacctctcaaagtcgcagttgcctcatctgtaaaacggtgatactactgcctgttttataggattattgtgataaaatacatgtaaagtagcaggcatctagtgggcattcaaccaatgttggatcatttatttatatttcttccttagctctgcagttgcattatcattatttttaaatgttgatactagtttttgaattgctgtgttgatttcagactttctgattgaaataatttaaaaaattgttagatagaagggaagaatgcagatttttttgacaggaaaaaatgttattgaactttgtttcaacataaaagttggtagggtttacccacaaaaatactttttagagaaaagccaacatggcatttattagctttggccattgcttggcaaggggttagttcttacttccaaattcataatgttgtcaagatatcttgtcacatgatcactggcataattaaactgttaccgcatggtgttccaaggggaatgctttctggagtcagttcccttgtgcatgtgatgaggccctagattttagctaggggctttttgtttcaccaaataaaacgatagctttctcgcccatgtccacggtgaataacaatcctattacaccttaccaaccattacggccacattgcagggtaaggagttgaaagaccttccagcatttgttatccacagggtgtgtcatttaaatccagtatcacataaagcttgaaaaataacttttatgcagaaaaatgtatatgaaggaaactctccaatttacctttggaccagaacatggtctataaaagtggcacattatgcaaatgaagtttactttctcctcctttctttttgcttgtgtaatataaagaatcacatgttatagaaactgatccttttctttgaagccaggggctgagaagtccctccagagcataacacagtgcttaagtactgtacttaggcacagcaagtgaaaacataatgaaatggaaaatgtgctttaaaatgaaatataattaatatgaacattcaccaggtttattcttcttgttgtgaatgattatagtttattgattttactttttcagttatttttagttatttcctacattgactcacctgtccaccctcctgcacatctcctcttgtaattataccctcctatgcaacctcaattcacggagaagcattatcatggcataattacatcacagggttgtggtgaagaaaaactgagataacatatatgatatacaaattcatgcaaatattaggaattagtattggtattcagattaaagaactaaggtggcactaagtccatacagttgatgtcactattcacgtaacaaactgtggtaatatcaggtttgtttactgcctgaaaacaagagagtatagggtattggctgagttttcccttattattcaacaaaacagcaggtgtaccagcaagggctctgccttcccttctgtggctgtcattcacatcaagctggttctagcaattgtgagacactgaagctccaaggacatgttgtcacctgctgaaggcttccagtctgttgtgacagaataattggtccctggtagaaaggaagcatatgccattaggtgtaagaacactgccacttgatgtcaggaagagaatctgccatttacctacctttgtcatgaaaatccccttcacaaaggcattctagtcctgacattcataattacttgctttctatagagtaattccagtgttgtaatttcttgcattgatacttgtagttccctccctctaataaaatctctgaaaatcaagcatctataaccctgattttctttgctatgcaaggagggctatgatattgtcatgatgtcaatccaaagtgacacataatcaagacttccagatccaagcaggctcaattgctctgctgcattgtttatttcacagacggcactggagcaggaggtgaagaggggagagctgtctaccaaagacatctccaaggatccctttcagtgaagcttagactcaggatttggcagaactcatagtatgaaatcatgtaccccactacaccactctctcacaagaaactcttcagggagaacaacgaatgacatcttgaaacattttgcagatcttcagggataaagccgtgaatgaaaaagatgttcatagagtccatcaccatcatttaaacactctctatataacagaaggatgccttagcaaaaccacagtatttttcccagaaacctttgtgcacaggatatttttattattgcttttccaagttaccctaagaatagaatatggtgttaagagaactgaagtccccaaagatatcttgcatccattttcttggagtggaaggaaaggaaatacagacttttttaaaagatggtttgctacttatatgttcttgacacaatcctgaggtcttagagagatcactattgcccccttttaggatggcaaattaatggagaggggtgagctttgtacttttcaaattcaaatggggtctatacattaattgtctctgcctttgtgtgggttaaaaaatctaagagacatgaagaaactgcttgaaattaatgtctttcataaaagatgactttttcacatctggaaaatgttcctttatattcatatttctgtcccccaaaaactataaaattttatcatgtgtactttagatagattatgccaatgcctatttagtttctcttttacagatgattattgcgagaagtgaattaagatgtttgaaataaatcagtctacttttgtgcctgggtagattttactcattgggttaataaacacattcatcgttatagctagaacatgtagatgtaaaatcagggattaatgatgttccatagctattttaaattaagagcaatattttccagacctgttaattttgaaaatacggttccatgttaacatgatttttcttaagtgtagcaatgggttatcaccgtctttactataaaaacaaacaaaacatctgacaagaaaaaccaccaaataattcttttgcacacacaaaaaagctgacagtttttctgtcttttccataaggaaaaagtatgccttgctttttgtctatcctctcaaaaccacaaaaggccaagctagacacaattcatgtttacagaaatcaaagacacttttattttatggtcccctgccatttctctctgccatgggacaatttcttactgcgtttcttgccaaacgagggtaggaatggaaagactatcaagtgccagtaagtccatttgagaaaagacaggtcaaggcttttcattttagaaagcctacaaaatacggagcagcttatagttatatgttgtgatgctttcagtggacacttttattgtggagtgttttattgttaagtttcatcgaacatcaagtgattggctcagcctgtgggatggccctcaagtgtgacagagtcaaacattactggttactggtcgtaggcctgccgagggctgattgcaccttccgtttagagagtatcatgccttttgcaacaaaaagcaaattaaagcccctgctgattgacagcgatatatgctacttttgtttttaattatttaacacttgacactctcagatggtaccttatataagaagaagaccaatttccaaagcaaccttgctttagaattgaaaaggcaagataacagattgaagatgactttcactactgattatctcttgttttcatttaaatatcagatgaaaggtttagaagcatgctgattatgttgttaaatagtcactgccctatatcttgaaagatatagtagccaccatttcaggggcatggctatttttggctctaaatgtaggcaagaaaattaagaattaccccaaattattgactgctgcagatgttccatttgggaaaataaaataataaatcgtgtaattcctacagagttagaattagatcttgtaagaaacaaattgttttctttgctgaagtattaaaagctgtgcaaacttaatttctttttcattgtcatttcctggatttgatattcccacccaagatgctaggagaagtcaccagtgattggggtgattctagcagaggctactgctccttggcactgaagtgggtggcttcaattcggtcgtctctgatgggaagcagagactatgggtgggctccctacacctgtttctggtagatctattaggaatcatcataagaagactatctaactttggcagtattgaaggatgtgtgacactgacatgccatccacacatcccttcagtgaagaacttgttgtctcagctactgggaaggctattgacagacaactgtcaatccctaagggaattttctgagttgcaggaagctagttgacccaaggtcacgccttccatggggtaggccatatccaacaactgatcagtgtgattgtattttatgcctggccgtctcagcccaactcagttcaattaaggaccactctagctcccactggggcctgctgaagtccgatctgcgtcacagcttgcgttctcccttcgttcactcctgcttccttacgttccctttcacaggcaatgaccccaaaacctctccttaatacacatgactccctctaaactctgtctcagggttggcttcccaaggaaaccaacctgcagccaacgagtaatcagtcccacttagaattcttgtacttgattgcttgcaattacagtcacattgtaggattgtgaccctgctttatgtttggtagctcttgttagcaatgccagcaacttcacggctgacattaaaagtgcagaaatgttccgtgaatgagtctaagaaaagtcccaagccttcatcttttcacctgggaccaagtatcagctcttgatggaattggagaaaatgaaaagagtatattctgttttgtgagaaatatgttggctttagtgtaatgaagcttttatagtttttgagttatgtgtatggccttatgaatttttgtcttttgaaaaacttctctctgatttaagattctaaagaattattgccttcattatcagtactcactgatgctgccaattcaattatctacaatggagggcagtggtgtccaatataaacaaaaacaatgatttatccagaatctcttatgtttgtccccgaagtacattttacttgcatttgaatgcaaaggcctatataatgcacatttaaaaacctaacttttaaataaactgcctgtagataattgaaaaagtctatatttatatttaattcttcctctaagaaagctataattatatataatcatagagataaagcgttatcttgcacaaaagtctttttgatattttatcagtcataaagaatattaaaaggaaatagagtagatatagggtcggttaagtgaaggaatagctgaaagacacttgaggagaaaaaacacgttaccatttttcagatgacattcgtaactttcttgtgaaatggaaattaatcaaatggaaggagattattcatgtgagcaattggcattacctgttcaaacttggttgatacacatacgataatttttaaagaagaaaccgtttaggctatttccattttaaaagttcacctctctattattggaagtttttttgatttgcctttttggatttgtgaatagaaagaaccaggccttattaatgcatatttttatctttttctttgatgggtgatagtcattaagaatgctaaatttaaatattctccttctcctctatgtcaatagtaaataataatatatcagtaataatcacagctaaacttcattgcatatattctctgctcaggcactatactagcactactacatacattttctctgtgtttctccagaagccttataaggaagttctcagtaaacctgtgagagctaaggcttgaaaatttaagtaatttaccaaaggtcacacagctacacagtcgcaggcacagcattcggggtcaggcagcctgactggcactatactctttccaatatactgaacgtttatgggtgacagctctgagtcctcaaaaggaatagaatcagcttcaagtgaaaacatagtgtgttagttcagagactgaaaaccataatccgtctcatttcagtgaattcccttcatccagtttaactgtcaggccatgcattacaccacgtgtttttaaacctctgagattcagtttaaatcattaccattttctttagaggctttcagagttatcaggctgctctttgcatatctttttattacttgtcactgatttaatgctatacattatggaaatgctttaatttctgaaattttcagtataaataattgcttatacagccattactatacatgccaagagacattagttcatcataaaatatttgagcacctactatgtgtcaggcactgttccacgcattaaatatacaatacagtagctccccccttatttgcacaggatatgttccaagccccccagtggatgcctgaaatcacagatagtacttagccctatgtatcctatgtgttttcctatacatacatagctgtgataaagtttaatttataaattaggcacaataagagattaactaataataaaagaggacaattgtaacaatagactatattaaaagttgtcattgtgatccctctctcaaaaggtcttattgtactgtaccttaggtaactgaaactgtgcaaagtgaaatcacagataagaggagactagcgtagtaaaggaaatggacattgtgtccactttcatgttgttccttagactgttcctggaaatgattttctccatattcgttggctctctcagctgttctgaacaaatttgggaagagagtttctatggtttgactctgtggacttggcctgagtatgaataactgggtcatgttcttgacctccaagaaacttggagcacagcctaagagattgcctgatggatacagtcatgaaatttagaacttgaagggacattagagaccacctaatccgaccattttaaacagatgcagaaacttcagagccaagcagggtcagactactaacccaggatctcagaatgagcttgtggcaaaagccaggccagaatccaattttctccttcaagggtcactttcttcccatggctccatacacatgctctaatctttggcacaccctggtcttaacctagtaaatactttggatagggttataatgaggattagctattgccttttgtggttgagcaaacatctgggtcaatgctagtaactgaagaaaaggaaaataataaagcaaaccaactacattatttaccaatatgaaagtgaatgctagcataaccattaaaggttaaaaattcaatggatgacaactgctcatgtatctttggatagctcataaataacagagacactgtgcttttaagtgatcactttgctgctcctttttcttctttatgtgattaattatggtaggagagcattttcccctcgaataaagcctacagcttaaagaatcagacatttctccctaagtttgttcttttgcctcattatataagagaaaaaggttttctctgtttttccaaaatgagatttataatcatccctagctgtggtggatgattttagatctcaccttgactgggttaagggatactcagatagctagtaaaatattatttctggttatatctgtgagggtgtttctgggaaagatttgtatttggtttttatttttgttaatttttatttattattattattattttgagacagggtctcactctgtcacccaagctggagtgcaatgatgcaatcttggctcactgcaacctctgcttcccaggctcaagtgatcctcctacgtcagcctcccaagtagctcgggctacgaatgcatgctaccatgccctgataatgtttatagtttttgtagagacagagtttcaccatgttgtccaggctggtctcaaactcctaggctcaaacaatctgcccacctcggactcccaaagtgctgagattacaggcagaagccactatgccctgcagagataacatctaaatcagtagactgagtaaagaagatctgccctcaccaatgtggacaggctttatataacctgctggaagaccatatagaacaaaaaggtggagaaagggtaaattggctcccttctgaagctggaatatccatcttctcatgtccttggacatcagaacttcaggttcaaacttcagactctgagactgacaccaggcacccactaggttctcaggcctttggactagaaatgaaatacatctccagtttcccacattctccaccttgcagacagcatatcctgcacttctttgtttccataattatgtgagtcagttcctataataaatcccatttctttttcagagatagaaagagagagatatctcttattggttctggttctcaggagaaccttaatatattttccctgtgaggatgtgattttggtaatattaattcttcaagaccttcttagtgattgattattgtggctagtatctattatattatattatatataatataccacagattacatattccttgtagtatcaaactttagaaaagtgttcaattgcatgaaatttctcttcatttcccccccattaatgatcacttccatactttcgtagaatattttcaccctctctttgttcagtgtttgccctctgttcccatataaggatgattaaaacccttaagctgcttctcactgaaaagaaagataagacataatgtgcccttctcttaaactacctggcataccattcccagagtcaaagagaaaagtctgtaatggaaacctacaggtagcctagtacctggagaaaattatttcttcctggttctgtgagtatgccactcacctggctggctacatcctgtgctggctccattctagaaaaagactggtcatttctataccagaagaaaagcaataatatatttatacatgcactgatttagtttttggccaggaaacttctctagtcctgcctctccacattctcttcaaacattctagcaacaaatatgagtaagaaaatgttttatactttaatgcattctcatatacagtgtctctgcttcctccaagcatatatactgtcctgagagcagtggaaccattctatggtgaaaaactttgctaaaaatctgttattgggccaggtgctgtagctcacatcagtaatcccagcactttgggaggccgaagtgggtagatcacttaagtttaggagttcaagaccagcctgggcaacatggtgaaaccccatctctacaagaaatacaaaacttagccaggcatggtggtgcgtgcctgtagtcccagctactctggaggctgaggtggaaggattgcttaaattcgggaagcaaaggttgcagtgagccaagattgtaccactgtactccagcctgggcaacagagggcgactctgtctcaaaaaaacaaaagaaaagaaaagaaaacaaaaaactatttttaacaaatatttattgagcacccactataagccaggatctcttctaggggctggggccatatcaatgaacaaagcaggcaataatctaggaccaatgagcagtggtgtacatatgaaggaatggttaaattctgaacagttctgaaggtagaattgaaagatttaatgagtactttaatttgaattatttcacaatttatttgaatatgaaatatcaaagagaggagtcaaggatgacttcaagttttgtggcctatgcaacagatgggttaaagttaccatttataagacagaccggctgggaaagagtaagttggggatgggatgggacagtatctatgagacatccaagtggaaatgttgaatagacagccacgtatgtgagtctggagacaaggaaaaggacaggattggagatatgacttacagatggaatttaaaatcatgagacttggtaacataaccttgtagggatcacaggtaggagaaggaagacagatatacatgagaatgaatatttagctgtcatcttcctggaagcacaaagagcaagtgtagtaaattactttgtgttttttcccatttaacatgtaaggtaggattaggttgtagaaaatagtttagatatccacagatgcatgtgcacacatgtacacacacacacacacacacacacacacacatactctcaaacaatagctctgaaaagataaagacaatgttgaatgggctgctttagaaacttggcctgtaatgaatatgacagcagttagcagttacagaccttgaggtgaatctttttctcctgggccttagtctgattatttgagtagtgagctatatattttccatgtcatcaaacacaaggggatcttgtgtagtttcatccctcatagataatagttttaatttcttggaaaaaaataaaagcaacaacttcttgaagataattccattcttctttatgctcccaactcctatccaattagtggttttctttgaaattatggtttgaagatattttccagaaggtgatttccctgtcctttatgaattgtaaaataatttcctccagtcaggcaagatttatttctttaatgaactaatgtgaaatccaggggctacctcaggggtgctcatatgtgccaagcattctgtgggcatttcacaaatgtctgtacctaatttgccagcagctcggtgatattggtataatatgcttcattcatggctgagaaaagtgagattagagagacttagaaactggttaagttagtaaaatcagtttttgtaactcaaatcctatgctcttttctctgtatatcatactgcatcttttttataacttgaacttttcatgctcccctccaaatttccgccttcaatttaagccaagcagattaaatatatctactgttagttccctggaatcagtgcttactctcttccaaccatgtgactaagcatttaagagtgaattctattgacagcgtcttcccttggagaactcccttgtatgttcaatgtgaaaccaccttgatctcctttgcccatgaatggctgtttttctgattaacttcatttcatagacctggtaactgagaagtgaaaaaccaatctcaatgtcagaggtaaaagcatagagcctattctctagtgacaaatcgttttgttcagggtatactacctgctgagacattgtaagtgttcaatgaggggattgtccaatttagtgcatcaatgccttatcatatttgtgtacacttcttccatgtatatgctcatgtgacctgcacaaatcctaaatgggtctgattagcctttgatgccttttcatgttttgttctgccatattatttctgggaagttagaaaaagggaagagatgtcttaaaatatgacctttgaatttcaatgactcaaagagatgatggcatagatggctgttgagttcagcaaatagattggcaaagattaagaagatgggtcacactactatagtaggtgtgtgaggaaaacggaacttttacatattgttgatagaggtataaatttgtacaaatttagagaaatacctaaaacacattaaatttgtaattcctttgatctaataattctactgctagaaatgcatcctttagatatacttgcacagttaccacaattaagatatctgggcaaagtaactaggtcgaaatatttgcttattaccatacaatggtgttgagaagcaaaggacacttacatagcattctaaaacaaacaacaagtagaataagctctgaattgatattagttattttgctaataatgcaagtcatcgtttctatgttaaaaaatttgaaaccatagataaattagaaaaaagaagaaaggaggatattctttgtgccaccacccatagataaccattattaaaaatttgatgtgttttccttcagttcttttctgtgcaagagtgttatgtgctaactttgtaacactgccattttccttttattaaaactttaagaatcatttttaataagctcaagattccttgttatatataagtacagtaaaacgaaaccttccccttgtgtaggatacttagttgtttccggttttgctcaagtattataatggaagcaggcaaaaaaggcatctacatattccttttctattaattaattgtttctgtcccacttacgctgatagattctgggtttgtggaaacttagttaatagtctaagtcagtgtattctaatttgtttctttcttggtaaataatgtttatggctggtagagtaagtcagctagttataatcattgtagtacatgcatacgtattacacatacagacatatataatacgtattttctttttattttagcagcagcattttattttggcacatatattttgggagtagcacaagctacattattggcggaagtctggtatcctttaggagtttgcattctagagtgactgccttagtttgaaccttgactggtagctatgtgatttgaggtagatcctttacccgctcacagccttagttgcctcctctgcaaaatagtgatgacaataatacctacattaggggctaaatataagtattaaaggtaatgcaacgcacagtgctcaatacataataagtgctcaataaagagttgtcactgttactagagttacttgtttctcattattcacactgttcttttgatgttgttgtagtttttgctttgctttgtttcttgccacacgttctgtttacttctaggcaagtataattttctcagctataaattgtattaatcttatgcattcatttctgtaatgagcacattctcctttctcttcttctgtccctttttctaccccaactagtgctaaaatatgaattgtaaactgctagcattaaaatgaaatttttggcaaaaccatgagatcctactttcctttatatctatatgaattggtatcttttaaaccagagctactagattgctaatttttaaaaatctgttaacgtttttgtagaaggacaattattcagtgtgtacagtaatgaagccgttgatccattagaattgtgcagaaatatagggcttgaactcttaaaattctcttacttacctcgtaagtagtaaaattcagactcagtgattctagtataaacttcaaaatgcagtagaaggagaagcagaaaaatgacttagcggagtggcaaattgataataacccgtttagatctcttcattatgccccgtggcttttctgcatccttaacatcagattttgctgcaagcgttttgtatttctcagggaaaataattcataaagatcatgaatgcccacgctttgtgaagagacctattgtcattagcagccagattctcatgggaaatggaagtcacaggaggacaatcataaatgacatttctgattatgtaattttgtagtatacactgacatttggtttcctatctttagtatagagattaaaggatccctttttcctgatgtttttcatttttccttctgtttaagtttatgaaaatataaatcaataattgtaatgataaaaatagaaaaaatctgaagtaaaagtctcctgtcaatctacctccagagacaaacattatcattttcctatgtagactttttgttctttctccatacattcaagtctatatgcttctatatatcacatgtctatattacatacacttttaaaatgatactgcttttttttctttcaaagcagcccacgaggcaaaaattttagtgcattaagtttatttaggaagtgatccatgaaaacagaagtaaaggaatagggaaaataagatagggatggggaaaatgttcaaaaatcatgttctattaagcaagtttgagctccagcagaactggagctcaattctgctggaaactctgaggaaccatgtagaaagcaccgagatgaaaagtctggagcatttattgttcaacttccatactccattggttggaggttgccccagagtgttaactcccctgcaacttggactgcatgtgtgcacagctgagcaaccttctgcagctttggaaaaagcagggcagagagatccagcacatgcttggtatgtaactagtaacagtctatgactctctaccacagttctgttgtaatcaggtaggccaaggagatgtgctgccgcataccaggagcctctgcaatcctgacctgcatgctgttcttcaactagctttttaaaaaatataacaacgtatccctggatacatttccaagtcagtacatgcacacattctttttgtttttaatgacagcattcctccgtgaatattagagtgggctagctaatcatttaagtgagtacaatgccagcttttgtcttcattttactgtgtgaacatataggtatgctaaatattcctccataaaacaaagagtgatttttgcttctcaagcttttatgtacacatgaatcacctatggatcttgttaaaacgcagatctgatttagtatatctggggtggggcctaagactctccatttctaatgattcctcaagtcttattgatccataaatcaggctttgagttcatggttctaaaatgaaacaacgtgaaagaaacttgtacgctgtgaaaatgttccttataaaagtctagaaagttttccacaagctaagacattggactaggagctgaatctaatttccagctataaatttgctttgagaccttgggcaagtcttttcttaccttggttatcactcaggtgccttggccataggtagtattttatgatccaatatgttcattttttttacttgcaaagagaatctgctttttgtctactcagttccacgactgtgttgagccaaactaaggctataaaaccagatttaagaaattccagggttcctgcatgtttatatttatagatcatcactactcttattaggtgaaactagatgagtcagattgcaaaactagatgtttaatggatatatcaaacttaaaatattcaaagtagagttgtagatttcccccctcacatttggccctccatcttctatgataatcaatagtagctgtgggccaggacgcaaaagtcaaaaccctgagatcatccttggactttcttttctcaaattcctcaaattctgtgcatcagaaagtgtgtagaatttacctgcaaaacagatttcttaatccacttttctttataactatcttcactaatatatccagaaggactctcctcatccattacaacagcttcccacctaattggaactcggctccatttattggccctacattttcttacagatacattttttttttttttaggcaaatcagattttgtctttccccacttaaattcatcaatgtcttctcattgtacttagcataatcccaattcacagtatgtagacccacatggcccacaaggccctatgtgatctggcccctgcctacctttccaaagtcacttcatgccattacccgctagctccctctgttgcacccacattggccctttttatttacccaggatgcaggaagctcttttttgcctgagaaacgtggccttttcaccttccttgaaaatgttttggattttattaattttgtagtactttttagtaaaactgaaattcatcaatcctttttctatgtaaattgtatcatatgtagccattgtaagcattttctcatttacttgggaagaaaatatagacaggcacccagtgaatgtgtacagccaattaacaggaagaaaaggaaagatattaacatttacaaagtgtccattaatctttacagtaaccctatggtagtagtagtattcttgtaactgacagtgaaataaaaactcaaggaagtgaacttattagtctggaatgatagggtctacctatgtatgtatgtgtttatatatataaacatatacctaaataatatgttaaatgcttttggatttgaaagcagattgatcatccatgcaaatctctggcatttttttgttgtattggcattgttctcactaaagtgtgtggaaataatttttaagaattcatgagttccctgtaagaatctgtgtgtgtgtgtgtgtgtgagtgtgtgtgtgacttttcattctatggtaatcttttaaaaattatgaaagcatatttgagatcatctggaggatcggtcaacgacactgtctgtgtctgtatttatatctgtaattatctggtgccaaagaggcctgctgtcattgtctggggctaatgaggaaggaaagagaaaagacgctgactaaataagtaaatgatgcttttaaaccaaatgaaagctgttaccctggcaagctacactcagatgaaggttttatagaaaaagtagtggaagaatctgaatgtcatgtggcacaaagtatacagcctatgaatttcaaaaatatttagtgttgcagcagatactagcagattcacactgcaagcggcaatttagatttggcaaaataacattatctatgatactaaattaatattttaattgaattgttttggttatacaagttagcttttatgaaattttaaaatgtatttggcttaacagttgtactcaaactataacagaggcatttatgcctcgttacatccttgcacacatgtaaggactctttaatgataaaaatacccaaatcaacattggaagccttatgtatatttatataagatatatatgatatatggtgatgtaataactatataacaacagagatataatattaaatatgtatttttttctttcctcgtaagtggtctaatactagggtatagcaaccttggcatgacagattctttcacaggtaattctttgagtaggagacattcctgtgtgtgtagaatgccagtagcagcccctacagtgcagttgttacaaagaaaaatgtctccagatgttgccaacagtcctctgaggggaaaactgccctgtttcagggtcacgggtctatccatttctctaagatagtaaccactgccttattccatgttgtggatgaggttgtaaactcacaaaactatgatgtttccaactattaatgaggaaataattctgaaagtgcatatataggcaacattatgagaagaaaatctggcagagtcaggtgagcatggggatagtagaagagaaatatatctgtaattaaagagaatttatgtggctcttcttttatttactattgcctattgatgcctggaatccagtttgaatgtccatcttcattctctctgtacacacctaagcagaaatattgcctaaaacctttagtggagaccatgagcgagtggtatgcaaatgaaccaaacaaataaacactgtccaaggtactgctgagtatgttaattgtgcaatattaggagaagcagatgctgaatttcgtgtttggtattctttctgtctcaagggagggcagtttgaatgcaagacacaaaatatacactgtcttaaatttcttttataaggtaaagcacttatgaggaatacttttatatttttggattttggctatcaaaattaacagcttgtttattttattttttcagttttttcatgttatttttttgtaattttaaacttgtaaaaatgttgcaaaaataccataatacttttcacccaaattttccacgtactaacatctcttacatttgctttatcattttctctattaatatatacatattattattttaagatgtttgagactaaatttaggacatgatgccctcgtatccataaagagtttagttatatgtcctaataacaaggtaattcatttacattacaacagtggaataatcaacatcaggaaattaacactggtacaatagaaatgtctaatctatagaactgagttgaattttgcattattccataaatgtcctttataataaacaaaaaatttttttaggggagggtttgggatctaggattcaatctaggatcaaatgttagattcgtaagtctctcagtgtcctttaatctgcaatcattcttctgtctttcttcatcttgacatttttgaagattataggccaattattatgtagagcatccctaccttagatctatgggatgtttttctatgattaggttcgggttatgccttgctgaaaggaatgccatatagtgctgtgatgtccttctcagtgtatcatatcgagaggcacaagatactcattcatcccattctgctgatactactttgatcacttgtttgcggtgatatttgccaaatgtctccatggaaaagttacagttttccatggagattgatgtacatttcctagttcctatcagacttttactcactctttttttttcttttcttttttgttttttgagatggagtttcactcttgttgcccaggctggagtgcaacggcatgatcttggctcactgcaacctccgcctcccaggttcaagtgattctcctgcctcatcctcctgaatggctgggattacaggcgcacatccccacgcctggctaattttttgtatttttagtagagatggggtttcaccatgttggctaggctggtctcaactcctgacctcaggtgatccacccacctcatcctcccaaagtgctgggattacaggcatgagccaccatgtccagcctcactcactagtttttacatacactgatcgttctagcctaaataaattattaccattggggtgtcatgtggtgattttgttaacgtcaatattccttctacatttattagcttttattatactttaagtacaggtttatctttttcctcttttgtctagtaattcacttatataagaaggaactcatagattgtaactttatcatatgtgttaaaatcattaatgacattttatatacagatgctcagacagtttaaatagagctaagaaggtgatcatttatgcactagttgcattttcctcctctcctctcttctataacatcttagctaatattgttgtcctattccattattaggataatccagcagaatctgttgctgtttcgaaggttgggtgccagttctgccttagtgattcattgaggtggagctgaaagagcagaagtcaccctctccttggaagccaggagcattttattgtttttaacagtgctgagaatgccagtgactctaaagatgagaaaaaaaactctcttaatgagtttcagcattttaatgtactgcaggttcccaattgtatgagtttaagaagcttagcaattcggtatcttctgaataatagcatttattttatactgtaaatactcccagggaagtctgaataacactacagcttcttcggtgtaatagctttggtgagctaattgacttgaacagtggaattgctccttaaaaaaaaaaagccacacagttttgattaatgagcccagtaataaatcattaatctttgtcgctcacaaatgataggaacagtgttatgtttcccaccctgtaatatatttcttgattctcttgctaatacagtggccacattttaaggatctcattatcaatttaatatgcctacctccatataatttaatataacatctagtaagtttacacttatgaggaacacaatgggacacattctaaatagtgataattgttctgtaattaacatgacttatatttacttagtagctgtcctcttaaagtgttctaaatttccttatgtaataaaaattgtagaaatgatcatgatttactgagcttctgtattcctgaaactctgctaaatttttagtatatcataacattgaatttctacaataaccctctaaggttattagtattattatctccatttttcagtcaaggaaatttgctgagaagtgttaataacagttagtgtcagggccaccatgtcattacatgttcacagctcatgcctactcaaagttttctggaagcttaagaacaaaatcatttttattaaaatggaagtatatagttatacagtcaatccaaattgatgtttgtcattgttttagggcttaatgtatctcagtgtcttttacattttaaaatttaattttcatgcatatcatgtagctgagacaccgtttaaaaataatttagattgtcaaatcatcattttaaggaaaatggaatttcaagttaagggctataagagttaggggacagatatctaattcttcgttgccctaatgtgtcagctaacaaaaaatagcactttattattgaaatttagttgtgtaacatccactagtctgaactttctaaggcaggcagagatcatgtcctattacatctttgtcctcagaatttagctcaaggggtgacatacactagaagatgaaaaaactattgaatgagtgagtgaatgatcaagagcaaatatgaaaaaataagtggatgatccatttagtaatgtgcccaagtcaagagatggaaatcgacaagtgactttgagttggattagtgttgtgaccacgagtacctccatttgttcaggtgagctacttactgaatcacaagactcctgtagggagaaaacatataactaagaaaaactaagatgtatgcattactttttcattgatagcctaggcactctaagtaaaattatttaactcattgtcgagtcacattaaacgtaagacttatttctttctaacttacgagttttttaaaaattgcaaataaaaattcaaaagctaacagaagacaagaaacaactaagatcacagcagaactgaaggagatagagacatgaaaaatgtttcaaaaattcagtgaatccaggagctggttttttgaaaagattaacaaaatagagagactgctagctagactagtaaagaagaaaagaaagagagaagaataaaatagacacaataaaaataataaaggggatatcaccactgatcccacagaaatacaaactaccaccagaaaatactataaacacctctatgaaaaatctagaagaaatggataaattcctggccacatacatcatcccaagactaaaccaggaagaagtcaaatacctgaatagaccaataacaagttctgaaattgagacagtaattaatacgctaccaaccaaaaaaaccccaggaccagatggattcagagccgaattctaccagatgtacaaagaagagctggtgccattgtttcagaaactattccaaacaatagaaaaagagggaatcctccctaactcaccctatgaggccagcatcatcctgataacaaaacctggcagagacacaacaaaaaagaaaatttcaggccaatactcctgatgaacatggatgcgaaaatcctcaataaaatacttgcaaaccgaatctggcagcacatgaaaaagcttatccaccacaatcaagttggcttcatcccagggatgcaaggctggttcaacatatgcaaatcaataaacataatccatcacataaacagaactaatgacaaaaaccacatgattatcccaatagatgcagaaaacgccttcgataaaattcaacaccccttcatgctaaaaactctcaatatactaggtactgttagaccatatctcaaaataataagagctatttatgacaaacccgtagccaatatcataccgaatgggcaaaagctggaagcattccctttgaaaactggcagaagacaaggatgccctctctcaccactcctattcagcatagtattggaagttctggccagggcaatcagtcaagagaaagaaataaagggtattcaaatggaaagagaggaagtcaaattgtctctgtttgcagatgacgtgattttatatttagaaaacaccattgtctcagcgcaaaaactccttatgctgataagcaacttgagcaaagtcccaggatgcaaaatcaatgtgcaaaaatcacaatcattcttatacaccaacaagacaagcagagattcaaatcgtgagggaactcccatacacaattgcatgggagaataaaatacctaggaatacaacttacaagggatgtgaaggacctcttcaaggagaactacaaaccagtgctcagggaaataagagcagacacaaacaaatggaaaaacattccatgctcatgggtaggaagaatcaatataatgaaaatggtgaaaatggccatactgcccaaagtaatttatagattcaatgctattcctgttaagctacgattgactttctttgcaaaattagaaaaaaagtactttaaatttcatatagaaccaaaaaagagcttgtatagccaagacaatcctaagcaaaatgaatgaagctggaggcatcacaatacccgactttaaactacactacaaggctacagtaaccaaaacaacatggtactggtaccaaaacagatatatagaccagtggaacagaacagaggcctcagaaataacaccacacatctacaaccatctgatcttcaacaaacctgacaaaaataagcaatggggaaaggattccctatttaataaatggtgcttggaaaactggctagccatatgcagaaaacagaatctggacccctttcttacaccttatacaaaaattaactcatgatggattaaaaacttaaatgtaaaaccccaagtcataaaaaccctagaagaaaacctaggcaataccattcaggacataggcatgggcaaagacttcatgactaaaacactaaaagcaattgcaacaaaggccagaattgacagattggatcaaatcaaactaaagagcttctgcacagcaaaagaaactatcatcagagtgaacatgcaaactacagaatgggagaaaatttttgcaatctacctatctgacaaaggtctaatatccagaatgtacaaggaacttaaatttacaagaaaaaaacaaccctatcaaaaagtaggcaaaggatatgaacagacacttcccaaaagaagacatttatgcagccaacaaatattaaaaaaaggtcatcatcactggtcattagagaaatgcaaatcgaaaccgcaatgagataccatctcatgccagttagaatggcagttattaaaaagtcaggaaacaacagatgctgacatggctgtggaaaaataggaatgcttttacactgttggtgggagtgtaaattagttcaaccattgtggaagacagtgtggcgattcctcaaggatctagaaccagaaataccatttgacccagcaatcgcattactgggtatatacccaaaggattattaatcatgctactaaaaagacacatgcacatgtatgtttattacagcactatttacgatagtaaagacttggaaccaaccccaatgtccatcaatgatagactggataaagaaaatctggcatatatacaccatggaatactatgcagccataaaaagaatgagttcatgtcctttgcggggacatggatgaagctggaagctatcattctcagtaaactcacacaagaacagaaaaccaaacactgcatgttctcacttataaatgggagttgaaccatgagaaaacatggacacggggagcggaacatcacacactgggggcctgttggggcaggggggtaaggggagggagaggattgggacaaatacctaactcatgcgaggcttaaaacctagatgacgggtcgataggtgcagcaagccaccatggctcatgtatacctatgtaacaaacctgcacgttctgcacatgtatcccagaacttaaaataacatctaaagaaaaatgtaaataatgtatatgccaaatgatgccggcaatcgtgatgaaagacattcttttaaaataaaaaaatagtttaaccttatttgaacaccctcaactcactgttgcacctcttctttgctgtttctctaccaaagtcaccaggttaatataagaaatgaaggcaagacagtatcacctagttaggttccttctccagctaacatggcattaataaactgattttcattatgatatatacacacacagcacaccacttttctccaagctaatattaaggatcacagtttaccaaaagttgtgcagcctgttctctttggaaagcctctctttggaaagactaggatgaaataaatctactatatgccatccttcacttagactgacagaattttaatgtatagcagaatttttttttaagtgccaatgtagagctgactgcttcctctataacacataaaatgcatatggctttacagggccagttttctgtacaattgacattggacaatttaggaataaatgtagattcaagcaaaacagcacacaagagaacattttgtatcaaagttgtggcttttcactttatgtgttaaatatatatatatattttattatactttaagttctagggtacatgtgcacaacgtgcaggtttgttacatacgtatacatgtgccatgttggtttgctgcacccatcagcttgtcatttacattaggtatttctcctaatgctatccctcccctaccgccccaccccccaaccccctgacaggccccagtgtgtgatgttgcccgccctgtgtccaagtgatctcattgttcagttcccacctatgagtgagaacatgcggtgtttggttttctgttcctgtgttagtttgctgaaaatggtttccagcttcatccatgtccctgaaaaggacatgaactcatcctttttatgtctgcatagtattccatggtgtatatgtgccacattttcttaatcctgtctatcattgatggacatttgggttgattccaagtctttgctattgtgaatagtgccgcaataaacatacgcgtgcatgtgtctttatagtagcatgatttataatcttttgggtatatacccagtaataggattgctggatcaaatgctatttctagttctagatgcttgaggaatcgccacactgtcttctacaatggttgaactaatttacactcccaccaacggtgtaaaagcgttcctatttctccacatcctccccagcatctgttgtttcctgactttttaatgatcaccattctaactggcatgagatggtatctcattgtggttttgatttgtatttctctgatgactaataatgatgagaattttttaattgggaaaaactacttcaaagttcatatggaaccaaaaaagagccctcatagccaagacaatcctaagcaaaaagaacaattgaattatagaacaataagaagaacaacaaaaagaacaataagaattataacctcagctttctcacatgtaaaatggggctatctacctcaagggctaaggaatataaacataatgaatttaaatgattttaaagcatagtattttttcatatagtaggcagtataaatactagataatatcataccataaaaaggtaaaggtaatgatatatatcttacctaacaacaaatagtttatataaaatgatattaatgttaatcttatatggcaatggataattttagtacaagtatgtcttatgtattattcatgatatactaaaaatagtatttgttgtttatcaaaaatttaaatttaacaagatgtcttatattttattgggcagccttaatatatatgacacagtgtttgtcaagtgagctctgttgcataattccaggagtcatcatttgtgctgtgttctgggcggggggcggggatgtcagtagactacaatgagaatggttgtctttgagtggaactcaatgcccctaatatcttttacatttcaatggtatgtttttgtatgtttaccaaaggtgaatctaggtgagcctcagcaagcctaagctgtcatattctaggcagaagatataaaaatgttttgcatctgttctatatttgtatgtgttatggtgattatttcagaagtaattagtagtgtatcatagtaaacctatggctgtcttcatgtcatttccacagttccatagttgtttggggcatcatagtctttatcgataaatcagttacagctttctatctcagagttcatagcaggtggataaaatagacattcctggggaacctctttctgagcagtgaattaaactctgagatttgtttacaatattgagtagttctctatagttttgtttcctgttctcatttttgaccatcaggaccacgagtacaaaacaatatatatttgtgatatggtaatatattaaaataaaactatagagagatctcaatattgtaaaatgttaatttagcattttctcacaggagaaaccatcacatcagggctgataactggtgatactgagctcaagttcatgaggtgtatatggagggagaaatcaaggaaagccagagatccaatctggccacctgttccaggaccaaaggtaacttaaatttagtcataaaggctggagatcctcatggaatcattcactgcctaactcaattgaaggctcctcaattgatcttgaaataaaagccagcccaagccttaaagaatagcctaaatgatcagtggttcaacactgggcattgtttcacaatcaggtccctgctgagtttgttctccagaattaaaccttccaattgaacttgaggacatgaactccagttgctgacactgtgcttacattatatccgaaataagtaaatgcttctttttaaaaaagtatttcttggggacattgttcttagtgtttcttatcttagggaaattgttcttatttttgttttggaaggaaaaaattggcagtcaccttcctctaactgaatcaccatgcagaactaacaaaagagaaatcaccttttctcttttagtagagacagaagacaattgaaaatatagaggcaccttcactgcttagcaaacaggacagagggcatgtttttaggtaccatttaagggtgaaagcctacttctttgcagtccttctttactcttccctttggtctttaatgccttaccttggatgtttgcttctggagcgcctgtcttgaggtaaggcatcttactttgcctagtcagaggcactggctttgtgtccagggaatgcagaagtcctagtgggaagttcagagctgatcgtatgtcctcatttcttcatagcaatatagatttgacaaaactaacacattgtattagtcagggttcttcagagaaacagaaccaataggatgtctctacctcactccctctcgtgcactctgtcactctgtctccctctctccccactgcaagtctctctctgtccttctgtccatctccctctcttcctctatccctccatctttccctctgtctcccatttccctctctccccatctccccctctgtacctccgtccctttaccttaatctctcactccctctctttttctctccctctctccctccatctgtccctctcctcctccctctctgccttccttcctctctcctccacatcactctatcttacccctcccctctttattgtatgaacttgactcatgagattatggaggcaacaagtcctaagatcttctgttggcagctggagtcctaggagagcccacatggttgttccagtctacaggctgtcaggttcaagactcaagaagggctgatatttcagtcacggtctgaagacaggaaaatgtaattccagctcaaaggcagtcagacgggaggaagtctttcttaactctggggaggatcagcctttttgttttattcaagtcttcatctgattgggtgagggccacccacattgaggagagcaatctgtttcacacagtgtatcaatttaaacgttaaactcattcaaaaatagccccatagaaacacccagaaaatggtttgaccaatctgggcacactgtgtctcagtcaagttgacacataaaattaactatcacacaaatatataatactgaagcaagtatggctgaaacagcaggcttccatcagttctcatctagaggtgcagtaactatcaccagaaaagtgaggacatctttgttcgaattagtgttaaactaattccaaaatatctgatgcctttagggcagtttgttaacatggaatgctctgattccctgttttcaaagtgagaaaaaacatttagtttttattattattaatttttaaattgctgcagcatataaaatagactgttccattaaaaaaatcttgctcccttgcatccacattaattttcttttctacaggtgagagtcactgaataacgatatttataggcaatctctagaattggtgtagtgtagtaaaaagtactacatcaagtcaaacaatatcccttatgatattgcttattcacttactaacttaaaatataggacccagttttctcatttgtattttttggaataataactctttccctatctaccttatgagatagataaagggccacatgatataaaatgactctgaaacatttaaaatattaaaaactctgctccatgtaaggtaatattattatctttagtctatatatacatctttctcaatgtttttaaaaaatatctatagttgcatgcttgctttagagttgtttcatacctcttcagggtatttctaaatgttttgtcaccactgctcaagataattcatcttgagatagcattttttcacccagtagttaaaaaatttctataaattcgttatacacaattttgtgacttaaaagctcttggaataatcatggaggtgcacgtatctttttcatatagttatttccttttttttttggatacttagtaatgggattgctgggtcacatgttagtatttttagttttctgaggaccctcatactgttttccataatggctatactaatttacattctgactaaaagtgtatacgagttcccttttttcaacgtcctcaccagcattggttattttttattttttctgataataggcattctaataggggtgagatgatatatcattgtggttttgatttgcatttccctgatgattagtgatgttgagtatatttctcatatatctgttggccattatgaatagttggcagatgaatagtatgcaaatatttttgcccattctgcaggttgtctccttactcggttgattgtttccttttagttggatacagtcccattagcccgtttttgcttttgttgcctgtgcttttgaagtcttatccacaaaaaatctttgtccagaccaatatcctaaaccctttcccttatgtagtcttctagtagtttacagtttgggggtcttacatttaagtctttaagccgttttgagattttgagttgatttttgtatatggtgaattataggggtctagtttcattattctgtatgtggatatccagtttttatagcaccatttaaaaatttagtatgtgtacacacacacccacacacacacacacagtggaatactatttagtcataaaagagaataaaattctgtcatgcatgacaacatagatgagcctggaggatattatgttaagtgaaacaagtcaggcacacaggaagataaataccacatgttctcactcatatgcaggagctaaaaaacttgaactcatagaagcagagagtagaactatggttactagaggctaggaagagtagcaggaagtggggatatggggctcttttgataaccaggtacaaaattacagctagtgaggataaataagttctagagttttatggcactgtaggatgactataattaacaataatttattgcatatttttaaatacctagaagaaaggagcttgaatgttcccaacacaaagaaataataaatgtttgaggttatgaatatgctaatgaccctgattcaatcattacacttgtattcatatatcaaaatatcactttgcaccacatacatttgtacaattattactggccaattaaaaatgttttttaaaaagggttcgatagtatataaagtaagcaagaactaatcactcactgagacccatagggtgttccattatgaaaagaaatagtaggaatatattcccataaagcagttctactcaaagtttgttacttgatacctatccacaatgaaatatgtacagaaattgagagaacgcatttaaaatcttttataacaattaacattaacataatatcaaatgcaatatgtaatttggtgtccgttgagtgtaatgatgaaaagttggacttgcattttgcatatccttttattttattttctattaatttatttttcttatattctacaaatatattgatccatggcatattggaaataaaaacagttcacactccaggtagcttaagaaattactctaaaatctcaacttcatgctagtactgtagctacttccagagcatttaaatgtcattccatcaaatgtgaatgttagcagattgttgttaagttttaaaattgtgttctactaatagcctttttcagaattatgtttctataatagccataatgcatattcaaaaacccagacgtaacctttgatctagatagggcagtgttttcttgtcctctacaagtattcatttgcttagccaccttgaaaggttctgaagttctgaaattgtcttaaactgctcaaaagcaaatgaatgacaataaatctgattttgacagcatacatacactaaaaacctgagaaaaaggaagtcatttcagagaaagtaaattatttacatatttttgcgtaagatgacagatctgggctcccattaacaatggagaggatacttttctaacttttaatgagcttttgacaaaactaaataataaaccaagaaatccttgtacaaatgaaaaaatgtagaaacagaccaaaatgggggagttacttatagtgacatggacagttatatgtaatagatgtatgaattgtagtcatatacttttacaatctaatatacactgcaaaatattcattcaatgactgtgtgtagaatactagctaaggctaggaactcttttttcatagccttcactctttgactcaagcttattgacgaataggcaaaagtgaataaaacaaggaactcagatatatttatttttgtctctataatattcttttgaaccacaacctatttattaatcattggattttaagaataaagtcagtgttgtaaattggcaataacatcagattatcatctatttctagcctgttcctctagctgagtggccttgggcaagtcataatctcaccactagcttctgcttttttccatctgttagataacaagattggataagatgccaccttaggtccattcaggagatttggccataaaaatttaagttaaaaaattataaaaagatctttttgattgcagttatcttgtgaaaaacttttccggaaaattaaaaggaaagagttctttgtttcatagtgccaatgaaccttttgaaaatgaccatccatttacataaacctgatatataaataaaattgaaagtaaaaatataaatgtatgtactattttaaagtttattttatgcataatttaaattctattttcaaccaatatattcaagactaatactgcattcatttcaaagaacagaattacttaaataacactccccaatgtcatattctttctgtgaatacaaattaaagaacgacactatccaatgtgctactgtctctgtgaatacaaattaaagagttggccttgttgtttgaatttggattcagaaaatagcttaccaggcaatcccttatgtactaagctctgcgtatttatggtacaccattttgagcagctgcaatgcattcaatactcagggaatttggaaatgattttgaatttggataaactggtgcactgatgcctggagaaaattctaaggtctgtacagtaccctgagacaatggcgtagactgtaattattaacctgatcaagggcaaaggggtattgaatattgagcaaattccaacccattcataggactgtcatgtgctgtggcccactcattggtaggctctgggttgatgaggaactccaaagctctggggcacgtatttcttgtataacttgagtagttctagacatgtgggactcagaaatcacatcataagaaagttgttcatttctcaattcttctttaattctgattcttcccagtaaaaagactcagtctggtgctagtgtgcttctaacacttccattaattatgaattccctttgcaacagagagtgaagcgggagcaccaaagccttctgcaaacagtatctagctataatttgaaaacatgagtttgttcactgtttttacagtaaccttctatttatggcaagtaatactggccttttagttatggtaacaacacaaagtgttttttttttgagacggactctcgctgtcgcccaggctggagtgcagtggcatgatctcagctcactgcaagctccgcctcccgggttcacgccattctcctgcctcagcctcccgagtagctgggactacaggcgcccgccaccaggctgtctaactttttgtatttttagtagagatggggtttcaccatgttagccagggtggtctcgacctcctgacctcgtgatccacccgcctcggcctcccaaagtgctgggattacaggcatgagccactgcgcccggcctacaaagttattttttaaaatagatttatttaagccccagaggtatgtttatttagaaaaattttaaaataagtaacaacctatgactgtcaaaaatttctaacatttggtgtttcaaataattgaagcttgagaaacattggacttgtggaaaatacactgagctggaagataggaaaattagtcactaaatctaattttagccctgtcactaattattagattgtccttgggcaagattgaatctttcatgtctccatttcctcattatccagtaagtgtagtaatatttgccaaactacttttggagcgacaatgtgaagattaaaattaaatgatgaatggtgaaatactatgaaccttggaagttatacgtagataaggttcattattatgtaactgaaatgtcccctttttttttatttaccacttcacaaaaacaaaaacaaaaacaagatcaaaaccatttaaagaataataatattatctctgttttttctctaggaccattaacagttactggtggtgatattgatgatggtggtggtgatagtggagtgtgtgtgtgtgtgtgtgtgtgtgtgtgtgtgtgtgtttatatgtatgtctgtgacagagaaagagagggagattaacttcactcattcagtttctatatgtaaactattcctaaatattaaggctctagtcatcttttccagattgattatattttatttttgctatttcccacggtgctaaaaagcttgaaaagtaaactgtgtttaaaatgaaactaataatacatcatattcactccaagttttaataaaaatatcacaatctatctgaatatttagttgttaaaaatacagaaatttagttgcatacaaaaattatttcttgacctgaaacaacatttggattcttgtttattctacttgtttattgtttttaaaaccgtaaatatctaataatatgatatcttttcacaaaagatattttactgttacataataccattttctatagacttcaggatttctttttctaatttaatgtctggcttatccttgaagctaaggtttttgtttagttaaaatataatagttcaattaaatatctggtacattttgatattaatgactaatctgtcaagtttttgactgttttatttgagacataaatacaactaagttctaaattattaattcattatataaaatagagaaaattgatacacacagaaataatgctagtaattgtggtttggtttcccattctattaagcaaaacttatttaagcattattggtgctgaattaggagatgatagacatcataatcttatttgtatataaatatttaggcttggtctaggatggcaattctcaaacttaagctgtcatcaggatcacctggagggcttgtcaaaacacagatttcttggcccactctcagattctgcttcagtagttctgtggtgaggcctgagaaattgtgtttccaataagttcccaggtgaggctaaggctaatgttgcatttctgggactatactttgagactcgttggtctagtggaaggcagtagaccagagcaataaatcccatggactttggtgataggcccagatttcagccctgactttggcacttatgagctgtgtaacttggataagttagggatcaattttgtcatccataaaatggtaattatatctattaagaatattgaatgaaataatgcatgttaagtgtttggaacaatgcttagcatattatgaactctcattaaatgcaatatcagtaactaattgtgatggtagtaagagtggtagtcatagaagtagtggttaatggtaataaaaaagaatatacacatttgccttagttcaattgcattaaaagtttattggtcggccggacgtgatggctcacacctgtaatcccagcactttgggaggccgaggtgggcggatcactaagtcaggaggagatggagaccatcctggctaacacggtgaaaccccgtctctactaaaaatacaaaaaattagctgggcgtggtggcgggcgcctgtagtcccagctactcgggaggctgaagcaggagaatggcgtgaacccgggaagcagagcttgcagtgagtcgagatcgcgccactgcactccagcctgggctacagagcgagactccgtctcaagaaaaaaaaaaaaaaaaaagaaaagtttattagtctttctaaggaatgatggatggagagcttggctttcattgatcattttgtctatgataaacattctgcacaagacatcagtaaaaagaagtaatgcccctagtgaaagcactttcaagagcattttggagattattatctagattgcagtttaaacaaaagtttctctatttgtacaatgtttctcaatactcagaacttaccatatttgttactttccttcccttagcaacaagagcaagacccaacaaacctatacatctcaaatctccccatttctatggatgagcaggagcttgagaatatgctgaaaccctttggacatgtcatttccacaagaatactaagagacgctaatggagtcagcagaggtgttggctttgccaggtaaaattctttctttgtatgtaatcgttctttcctcattgttccttttaaattccattccttttttagtactagagcccaaagcaatagaatatgcaaaaaaaaaaaaaaaattaaaagtagcttatcaaatctgtcatccctctgtgtctttgcttggagctaaataatttcaatgtaattataaataaactgtgcttgttcaaatgtacgtagaatgtgtttatgtgtcttgagtcataataacatacatactcagttcccagtcctctctgtgcctgtggatcaacaaaatcagatgctgccaatacctgacagagacaataaatgcccagtaccccaaagcaaaagagcccatgtggtgaacaaagcatctaagtgtttttgcattgatttccaaaaaagggtgctagcatttctcagtaaagagaaaataaaagaaaggaaacatttagagaaacaggaattactgagaagacccagcaaactcagaaatacaagggaggtcaagaagccatttgcatttaagaggccctggctatgtttttgatattttaggcagaacaggggaaaaaaaaatattcctttcattgtaagaaaaggaagagtaattttcattttaactttgaaggaatgtttacaaaagaggatttcagccaggaatggagtttaaatagttgtacctgctgtgctttcatgaaaaacaaagctaaagagaccacagagtaaaagaaactgctcaatgacaatgaagaaaaataagtcttgtctctatggcttggtacatttatgtgtgtctccagctgatttatcatggatgaatggatggatgttaagtgttatgtggaagtcagcccattgcagacaagtttgttcatctagggccaggcagggtggctgacgcctgtaatctcagcactttgggaggctgagaagggcagatcacaaggtcaggagttcgagaccagcctggccaacatagtgaaaacccatctctactgaaaatacaaaaattagccgttgcgtggtggcacatggctgtagtcccagctactcgggaggctgaggcaggagaatcacttgaacctgggaggcagaggttgtggcaagccgagatcgcgccactatactccagcctgggcaacacagcgagactccatctcaaaaaaaaaaaaaaaagaaaaaccattccaaactaacttccgttaactcactttagaagataacaaatcgtcatgtatatgttaactaatctctaactttatttccttggagttgtggttgtggaccatgtgtgaaaattcttcttattctccataatgtatacatagtaaaccaggagacaaatgcaaggtacatgcttgatgatttgaatagaaataaacagaatgaagaaaatctccctgacttgaatgtgtgcatgaggtattcaggctttcaggacattgacaactgttgattttcatggccaaggcagagcttatgacactacttggatctctgaatttagccaatgcagtcattcttatatagtgtgcaactagctattggaggcctgagcgatgtgggagttcactgaaccaactgtcatgttttactttacataccatacacattcctttggttcttcccccatcccttgccctccaaaaactctccaataaattagtttctccttcatttggactcttgctgggaaataaatgcatttcaaattcattaagagcacatatttccaagaagacctacagtgatatttttttctttaaacaaaggatgtgttcgtacaaagtatattagtttcctaggtctgtcataacaaaatgtcacggaacagtggctcatacaacatgaatttattttctcacaattttggaggctagaagtcagaggtcaagatgtctttatagctggcttcttgtgacacctttcttcttggcttgtaaatggctgtgttccccttctgtcctcacatggtcttccttctgtgcatgcctgtgtcttaatctcttaagagcaccaagtcatattgcaatagggcccaccctaatggcctcattttaacttaattacccctttaaaggggtaattacaaatacagtcacattctgaggtattgggggttaggacttcaacatatgagttttgtcgggtacacaattcagttcataacacaaagattgaactattcatttctctcccatttatcttttctatacaatgagagtttgcttaaaatgaggcatatttttcttaagtacagagtcaagtaatatatattctaaaaggcagaactataatgctggtatatgagatcatgaaagaataaaacttacaaagttatttttctttaggaactgagggagggtgggaattttacattttagctctattctgaatgcagcctctctctctcctctgttgcattttgcatatagaagccacagtgagcccttcaatattcaaatctcatcatgtcagggtcctgcttacaatccttcaacatttcacttgccaacctctccagcatcattcttgatattgctcgccttcctggctttgactctgtctcatgttcaggcacaagctgcccttcttgcctggttatactttccatggctcttctcctgacttctgcctgctcatctctcaggcaatggcttaaacatcttttcttcaaagaatttttcgctgacctccaatctttggctttggacaaagttaggtgctcttgttatagctcctataaaagttttgttttttctttcaaataaaatatatcacgattacaatgaattcattgtttaatttctgtcttcaccaaatggattgtacatttccttgggtcaagttttctttttctttgttggatggatgactagatatgtggctagtggatttcataattaccgttctgtgaagtttcagaatagctaaattcattggtcttttacaactttgagcttcaaatatgaattagcagtcacattccaattctgaaatttaggtatctgtatttcagaaagtgccatgtggactgaaaaggcaaacataggttcaagtcaagccactgatttcttatgcctaagaaataaaaatgaagtgtgagtctgactatcttttgaaagaagccaggaaaccaacacagaaaaagtatttcgttctccatgtatcttagattttaaattttgaggagcagaatcccatataattagcctaatttgatggggtgagaatatatttttagctgtaccataaatagatctgcccaaattcctacttccctataacattggctgtgcattttctcaagcaattatggcttttgccttaactaatttgatcattcacaacttaattcttgcacaaatgtttctccttttaaaaatattatcctgtcccttttccactctgcttttctcatctgaaattttccctctgaaccacaaaacagagatgatttcagtcaccattttcttgattcttccaagaatagcacatagcaagtgagagaaattattgtattacatgaggatgtcttgggacagtggttctcaaagtgtggttcccagatcagcagcttcagtgcttcctaaaaacttgttagaaatgcaaatttcctgcccccaatctaccgaattaacagtctggtggtgagggtgttcagcagtctgtaatctgtgtactaacaagcactttagatgactctaaaagcactctaaagctttgccttaggtcattagtacttgttcttaggaccacctgaatgatctgttaaaactctgattgctgggcccactcttaaagtttctgatccagttggcttggggtgagactcaattatttgcatttcttttttttttttttaaattttattattattatactttgaattttagggtacatgtgcacaatgtgcaggtttgttagatatgtatacatgtgccatgttggtatgctgcacccattaactcgtcatttagcattaggtatatctcctaatgctatccctcccccctccccccaccccacaacagtccccagagtgtgatgttccccttcctgtgtccatgtgttctcattgttcaattcccaccaatgagtgagaacatgcggtgtttggttttttgtccttgcaattatttgcatttctaacaagtttccaggtgatactgacactgctgatatgggaaccaccctttgagaactattgctttaaagttgtctgtgatttttccaggtggagttgattcctgttgatgcctgatttacattgttttactttctcaaaattactaataaggaactatcccccttcctgttcctcaagggtagaggccatgccttcttctttatatctgtccagtacttagaatattgacacataattgatcttgagcaaatttcttatgataaataaatgaaatcactttaaggttttgggtttttttaaatatagcaatatgcagaaagacatttgatgataatgataaaccaattgtgagatagagtactggaatattagaaaaatctgtggtagcaccaacccaactggtattagctcacaaattgtttcttcctctaggagtttacagttccacaggcattattaaaagaatatgccggctgggcgcggtggctcacacctgtaatcccagcactttgggaggccaaggcaggcagatcatgaggtcaggagttcgaggccagcctggccaacatagcgaaacctcatcgctactaaaaatacaaaaaaattagccaggcgtggtggcacgtgcctgtaatccgagctactcgggaggctgaggcatgagaatcgcttgaacctgggaggtagaggttgcagtgagctgagatcacaccattgcactccagcccgcacgatagtgtaagactccgtctcggaaaaaaaaaaaaaaaagtgcttatttaattgggagaatacctagccaataattgtgtctagtaaattgttgtacatatctcttgaatgtatgactgtttcaattcagaaaacctgaataattttttcagtggacttcattttgaatgttactattggtgacttctaaccatcatatgtggtccttaattcatgtacaagggattccaaaattcctttgactggaaagaacccccccgcctcaattattattttacttgcgactatacattaatcttctttgataaccatctcttcaaagtaaaaggagtatcttcattttatatttaaaacgctgaatttcaaagcattgatttgaatgccagtggggcgcacagacagcaaaattacaggcttttcaaagttccagaagcacaagatagtgtctgaaattacagacattttattttattttgtgtgtgtgtgtttttttttactctcttgtaacttaaaacaattttgtaagatccacccccctccaggcagcattttatagccaatttataaacctctaaaaaccgaagtttatggtgggaatgctgacagtcagccccactactgcagagctagtgaatgccaacagagtaccttgcctgcgagggtaaggatcagagcgtaaatcatccagagtctggagggccatgactgtgtgttcatgttatccatttcccatttccagaaacatgagactgattgtccagcaaaaatcacattgagagggtgttatgagaggccagtaaagaatgacccaaagtggggaagtgatgggtgggggacagggggagcagggggagcattcacaattaatccagcttcaacatctgggaacatagaacctctttaagcaatgcatttactatcccctggtgagctaaagagcgtgagagaccactgaacagagagacctttgtgttttgtagtattttttgcccttcctcaatactcttaatctgattctcatggagctttgtttgaatgacttctaacatatgggcagccctgtgttctacctctccctactgaatgtgcaagttttctaaataaataatttaagtttttctttcttttcattaagtaaaaaaaaaaagatgggtataggcatacaaatactagcctgcttactaaatatcaatcagtataaatagcaggtcttttttgtgttttctactaataactttgaatattattaaaatgttatttatttaccttctactgcctgatacttcttgttctcttcttccatctgctgaaatataatgagaccacagaaacagaataatcatatgaaaatacaggaattttaaaaaatatgttaaataacaatactttatttgaaggcaaatatatgactctttaaaatgcccatcaagtctatcaaatttttttaaattgtttggaattgtttggagtattgttttgactgtatctgtcttgaatccatcactgcagtaacaatttctccctcgctattttggcaatccttttgccgttactattttaaacacatgaaaccaggaaatcaaaagtgactaaggcaaatctctaaagtgtaaacttagtgattagtaatctccaaactacagctgtgtttgtacagaaacaggttacaactgtgttttctgagattgaagagaataaaggttgtatgtttcattctttttggtaattttaattcttcttctaattgccatcagatgtggtctgctggagagtatactcctggaccccctgcagcttcttcatctttgttcttcttttgtgtgtctcatcttgtttcttctccttgcctctttgtctttctcttaccatcagaaagtcaaaatcacagctggagagtgatgaacattctattttctttttcatatattcagagccctgggtttcaaaaccctaactaaccagtgaaccaaccaaacaaataaattgcatcaaataacttgttattctgaagtctccgagacggcagtcttgttgtatatatgcctttataaaaatctaacaaaggagatacaatatatactttattgctttattattataaaataaaaatgaccacatacgaaataatgccctctgtgaaatgcggagagagttctgaaaaattatttacctatataaaatggaactgggggagctttgttacctccagattagaaatggtggccattcagtatgctcagggctcataacatgtctttgacctgtacctgctgtaaacacaaagcatgtcaaggactattggagcatccagaaaagtggggacattggaggcagctagtctgcttctggccaatagaaaagtaagaggtggaaatatagcccaatatcatttgagcctcttttatttagtatattttctacactctcagctttctgtgaattgggccaatacatttattctctgtatctctatggttataaacatggttctacatgggtctgaaataacttagcttacatcttagttctgcacctcttacttgtgttcttggggcagttatataaactctctgagcctcttttcctgacatctatctatctatctatctatctaggtaggtaggtaggtagatagatagatagatagatagatagatagatagatagatagatagatagatagatagatgtcaggtcactattatccaatactggcttggtcaatattccagtaattgttatagatgaagtaattcagagatgtacatacacccacaaaaaaaatctgcttttacagaccaacattctactggattggggatgatgcaggatttttgctccttagttcaactaaatctgggttcttttctcatgaccaggaaaaattaggcatgtggatacactgaagtgtgaaaagggcagaatttattaagtgaaaggaaaactctcagcaaagaaaggggtagtatagccctaggtagtattggaaaaggcaacattcgtttggttaaaaggcattattcagaaagaatcaatcaggaaagagcgggcaaacaggggcagaagttgtccctctgggtcacaggtttcagttggaaccagcagtcatgtctttcagccttcaggctgttttaggcttgaaggtgatgtttcaccagggacccttccctatctgcctaggtaatttgtctgcctgctgcctctatcagggagatgacaataagtatgtaataaacaaataatcaaacatcagataatgaaaatattacaaaaacaccccaaacataggggtgtaatagagagtatggggcaataggaagcaagaggtaagagaatgatgttctgtcttcagagggaacattgaaactaaaatacaaatcagaaagaaccagccaagaaaatctcttagtgggagtagggaggcaagagaacaatcctggcaaagagaaaaggaagtagaaaacctaaggtggggccaagtttggcatgtttgggaaatagaaaggaaacaaaattgtgaaacattgagtaagggaaagaggtgtaataggtaataatgtcagccttaaataatgagattcagaaaatatgattaagtacagagtttatttgagctcagagcttgaagatggccactcaggagtgtagattcaagttgccctggatatacagtccaattagcagtagttacaagtgggtcttgaaaggaaaaaagaagcagtttttaagtttttgctaagaatatacattaaagtaatgtattgattggctattcatggttctttgtatcacagattccaagaacatgaagataatggtagaggcagctaattaggaacaaaaatgcctttaaaaaactaccctgggcatggatgctgtgaggaggggcatgatcaaaagtctccaactcatggctctctgggttggataaattttgcatacctcacatagctcagcctgatctgagttttctcatttccctccatttcatcaagatgttttgaagaaagcatagtagatgaactaaaagcattttgactccttagtcctatatcataaggaaggttcattcccaaatggttctgtcccactcaggtgggcgtgtggggaaggggcaggggagagaatacatctcagtaagaaattttaagtgtgcctaaagctgaattggaatggtatcacagggtggcaaaaatgagacttcagccaaatctcagtcaacttatttatatagttgctgtcacttattgaatcatcctggtctttagaatattatgactttaattttctcagaagcagtaaaacagtgagagatacatattgcaagtaaggattaccattacaaaaagagaacatgtattccaaaatgaaaaaggaaacctgttccactggtgagtacactgaaaacatcctgaagaaaattaaacccttgtcctttagagactcatagataggaaataattctggatttagtctaaaatataggaaaatcataaaaactcaaaaacagtagtcagtgctggaatctaatagcaggtgtgctatagttttcttctgaaacattatttttctctctccagttccccatgtaaaccaaggataattcttagtctgatcaatttatttgcaaaataagttttagtagtgctcttggcctgattatttgtataaagtgtaacaagaataatgaatggccatataggctcctttaagttggctttgctagaactttttcataaggaatctcaaattagatttttaaaagcctcttgaggctaggaaaacaagccaaggatttgctgtcaggttgtgcctgtaatacctatatgaattgggtaaagtcctctcttcttgaggtcccaaaatatcttgaggttcctggacctgtcagaaagtgatattctttacttatcataaggtcaggaaccttgtaagagaaccatgtaaaaatgtatcatgccagtcttttccagaggccttttattgggtttctaaagtcaacttcaattcctcaaagcaatctggtcatatctaaaaatatgccattccaataaaagctttggaaaaattaccagtgttcaatgtgtcctgataccaaaaaacaaacacattcttattgaacttatgcaaataactatattgccataaaacaagaatactcattattagtttccatattttgaagaaatcagctaaagagaaaagtgaacatttcaattttgcttgcaaatgtatactttaccccgttgctataagctatgaatagctgaaaagaaaataagacaaaatataaaagagtcagtaatgttgcaaacaaaaaagtcataaaaatcatttcagtcctctatcagttcagtaaattgaaataacttttgattgacgttgacttagcaatcttcattaatgtatcagctttttaattagagttctggcagattttacttcgtccaaaagtaagatctctaaatttatcagaaatctttattcaagaattcttgttgggattcttttccacgaattttttgaagaatggactatagctgattataaataacgttttgagaagacttaaagtaaaacgataattgtctgtggatgacaaaaagagtagccatggtcaaagatacaattgacaagaaatttaattatttttatggcataaaacaatgtaatataataatcataattatgtctgatagcatatatcaagacatatctgaatttaagaatctcatataattttggaatacatgttaatacatgtatactaatataactcaaacctatttttctaacttttattttaaattcaggggcacatgtgcaggttcgttatataggtaaacttgtgtcatgggggtttgttgtacagattacttcatcacccatatattaagcctagtacccattagttatttttctgatcctctccttcctcccaccttccaccttctgaagggccccagtgtgtgttgttcccctctatttgcccatataaacagcatttcttatttgacaatgcttcctatatgattttaacataccaaataagtgttatatgtctctcctggacttccaggggtttctcctttatgtccaggttagtacaaattaaaagataattttagaatttgaaatttaatttttggaaatatgtaaagtattaagggtttaaaacacttgatattgaaatttaaaaatgtttaaaactcatgatcaaaatagaatctgaagtcaatgcataataatagtcatttattttgtgaaaatgataattcaaaggtttcagaaagcaaaattttttattatttgatagggaagagatttaatacccaatcaagggacctaataaagacaacatgagggaaactctccctgcagcttaattattttacagtttactcaaaaagtaaacaaatcttttactatctcttattaatactacacaaaattcttgttctaaggagaaaaccaagttttacttttagtgtgttatcaatactaaagctaattttaataaaacattatgaccaaatctgtccaatctcaatcagctttgacctcacaaaataagatttccataaaccttttataaccttttgtaattttctattaaaaatgatcagtattttgagaaaaccctgtggcaacataggggcacagactgtggccttacatcagtgtgcttttgatattaatgctcagtttttagaaaaacatataaataatttctaattttagacaacttgaacacacacaaaatttctttcccaagattaatcttccacaaaccctctacaacgtgcttaaaatgttttgccactacctaagcaaaaattctatggataaatacataggtattttcctgatcagaagacagctattttcactaaaccaacaatattaaactagtcttaaagatttactcaaatcatgtgaactaaaaggcacttgagctggttttgagacaggatagttcccttggtacctttgtgggactcacaaaggggcggctcggttaggcagcccgcagcactcaaaccccttgtgggagggttagcacgcaggtgagctggtgcaggagccggggcaagtgcctttgggtgcctgcaggaacaaacactgtacaggcccatggcagcgcctaggggttgcctacgacccctggagccccagaggatgtgtgttatggtgtggtcctttagctttgtcatccatggatggcttaagtgtttaacagctcaatggggagttagtgtgacagcctcttccccctcacctcagttcttgtctggcatccaggaggagtgaggtcacacgaacaatttggagggtggtgaatgcagaggattttatcgtgtggtggaagtagttctcagcaggaaggggagctggaagggcaatatagtgggaagataatcttcccctggagttgggccatctgtggcagaactcttctatgaaattctgctgtcaagccatccctctgaagtcaagctgcttctttctaatatccagctggttcctcttttctccttccctgccagtggagcttggagtttttatgggtacagggtggagggtggggccggccagggtagttttggaaaaggcaacatttgggtgggaaaacagggatgtgaagttttcatttagggcattggttttgggcttgagggtggagccctcgccggggaaccaccatcttctacccagtatttccctgcctcctgtctgtatgtagtttctatttttctgataaaatatttgatttaaccacttacattttctttaagacaattaattggaggttcttcatatatgttgctagtaaaatgtcacatacacatgccacatttaaacatatagacatacaggacacatagaagcaaattttgtattaatagctttataaggttctccatttgccagtttgcaaatagtttctttcctctttagactctcaagccctaaacaattattagctaggctatcctaaatttacaatcacaaaaacatgactcttaggtgaaaatttacctcccaaaggcacagaacttagatctaaacacctttatttactgagacaaagaagggcataggtaaaggcccagtcaagataagattaccagcaaaaatatcttaaacaaaagtaaggttggttttataaactttaaggcactgtttttcctgtcataaaagtttctagtagcttaggtggagcaagggagatgctcctacaaatggagatttccgttatatatgtatatttattttacaaagagtttcaaaatagccacctaaatgccagaaagtcatattttggagaccaatctagtcagaaagctggtattttcaacttagcttatgtattgattagattactaacctcagggttgagccctttaatgaatagcaaaatgaaagcatttgcagtttttggggactaatgtttacatatgtgaaaaacaggcagtgcacctagatatttaaaattgaacgatcccacttttacattgaatcccgggtcccccagaaaagagaaatgccacaagaccggggtatgcaatgtttccacaatgcacctcactgcatacattccctcaagactggtaggtgagcaatgcccatcagcccactctgtgatcagaccaccctcccacaggaggagttttatgccttgaggggaagtgtttcctccaccttcaagtgttcaaacctgtctttctatctaaacaccggaaaaaatgagtagccccgtacatttataatcattcactgtaactgatttcagctgcttcagaaaccacagtttttgccagtgacttgtcagccattgcacacacaaaattcaagttgtatctcatagtacagagtaatccctggtaccctaaaagctaaagaggtcagttactacttctaacagctcttgcaaatctttattattagactcagttatggaagtacgattgcccataatcatatttcctttttgaatgataaaaaagacccagtgagaggaattttggtcacccaagaagaatgtttagatttgtcaattgaactgagctgtgaaatctgaccaattttaaagattacaaatttttcacttaagctgtaagattacactttttcttttcagagagaaactattttttccccgaccaaaattttaaatgagataaaagattgaaaaactctttttttttttttgagacagagtctcattctgtcacccaggctacagtgcagtggcacgattttggctgactgcaacttctgcctcccaggttcaagggatcctcttgcctcagcctcccgagtagctgagattacaggcgcccaccaccatgcctaatttttgtattttaaatagaggcagggtttcaccatgttggccaggctggtccgaactcctgacctcaagtgatcctcttgcctcagcctcccaaagtgctgggatcacaggcgtgagccaccgtacatggctaaaagatgggaaaactctaagaattaattcaaaataacactagctcaaaaagaaaaagtgaaagtcacaaatctgcaatcagcagagactctagagaataacaaatggaactcctaccttacagtagagcttcatttccaaccatgttgtggcaggaatgtgtgcagtttcaaaaagtgaattggtctgaatgttcaaccaagaatggagcattcaaatctgaggagggcttacccagttgactgacctccgctgactccagtgaggtcagatgaatgaaagttatgctcatatcaggactccagctgtcagcaaagcaagggagatcactgaaagtctgtttcaggtcccacctgagtcaccaaaatgtcaaccttaaataacataagtacagagattatatgagctcaaagcttgaagatggccacccaggagcctagattcatgttgccctgaatatacagtccaattagcaatagttacaagtgggtctttaaaggaaaaaagaagagaagttgtttatcaagacttttcgttaagataacataagctattaattggttattcattgctctttgtgtcacaaatgctaggaatatgaagataatgagtgagaaagctggtcaggaacaaaaatgccttaaacaattgcccccagtcatggctactcaggggagagacagccatgactgaagccctgtacttatgtctctctgggcctgataaatgttgcatatctcacatagttgacctgctctgagctatttttcttttctcaataatatctaggaatgaaatatggctgtagctaggagattgattaaaagtggtaatgtattccagagtcattaatggtatgacttttctacacctatgcttaattttcactttatctcagattatttatttaagtttaattttctgccatttctttatgaaaattccttctagaaacattggtctggctaaaaaaatatacttagataattatgcatctatgtgagtacatagatgagtgtccctactggggataatcaggtaatccaagtgaaagaagtagtttctagatggagtataaggcaaactttatctcttacatgcttcttgaaacacacagtctttgggataatttttttactcctctgctgttgatagctttatggtgtaggcatcaagatgctggctggaagcagagtttcactccagatgattctactgaagaaaattaaggagtatttaccaaatatttacagaagcagtgttaagggaactgaggtaaaggcaaagagatgttgatgttcccagagaggagcaacagagggaaacgtttaccaccctgagagctcaaggagcaaccacaagggtgtttccagagttcattgagagccagagcctcagaggagggcctgcttggaaggactgtagacagggagagatgcaacccctgctagacagaagtgccaaagcagggagacaaagagggaaaaccactcagatttctctctactcttgccttttgaagttctttctttcaagcttccataggcagaacccaatggaaaaccagtaaacaaaagaactaagattacacagtcgatagaagggtcacttccttggggcatagagcaggacagagaggacatttaggaaaggatgagcagaaatacaccactctccctgtataaattaagttaaataatttttcttttctcctaactattaaaaataaagaatgcaagttcagtgataaacagcacctactattttgccttaggattggcaattgatacagcttggtaggaataatggcaaagtggcttcatttaaagaacaaaactgctcttttactctgttccatggttgctgtgatgtctttttttctgacaccaaatgtgtgggtttttctgacatcaaataccttatttttgcatatcgattctctaattctctgacatcaattggatgtcctacaatttaactcagttttgacacaaactacctgatcatcatgagacttcacaggtgtaagggctcagttccacaccagctgcaaatggagtgcccaggtgtattagtccatcctcatacttctatgaagaaatacctgagactgagtaatttataaagaaaaagaggtttcatggactcacagatccacatggctggtgaggcctcacaatcatagtggaaggcaaagggggagcaaaggcttgtcttacatggcagtaggcaagagagtgtgtgcaggggaactatcctttataaaaccatcagatctcatcagacttactcactatcatgagaacagcacagaaaaaaaacccacccccatgattcgattacctgccaccaggtccctcccatggcacatgagaattgtaggagctacaattcaagatgagatttggttggggacacagcaaaaccatatcaccaagctacccacatttcttcccagcaactacaaaatgtgggagtacccacaactccccaattcaggtttagtaactcactaaaatgactctcaaagcactttatgtttatcagtttattataaaggatacaactcaaatgaaagaaatgcatatggccaagcatcagggaaggagtgtgtagcttctgtagcctctctgggctcactaccctcctggcatatatcagtgtcttcaccaaactgaaaatttcctgaaccttgttgtttagggatttttatataggtttcattaggtaaaacctctgggtttgattaattaaatcattagcccttggtgtttgagctcaatctctggcccctctccagttcttggaagtcagagagggtggggatgaaagttccaacccactaatcaagtcttagtctttctggtgaccagtccccatcctgaagctacctgagtgacctcattagcataaactcagatgtggttaaaaatagtctgttctgaataacaaaacatacccctatcactcaggaaattccaagggttttagaagctgtgtgtcagcaacctgagaaaaagactaaatatattttttattatgtcatagttgccatgcagaaagcatgggttaaactgtcccatctattaaaaggaatcacagatttcaattttcatgtgaaatctcccaagtttcaaatgttgacaaccatttcaaaatttccaaaatctctttgcagtccaaataaaacatacctgtagactgggtttggcccatggtttctagtctctcatacctgacacagaacttcggaacaggagttttcaaccctggctgcacactgaaatcacctgggtagctttgaaatctttgtgcctgggcctcatgccaaaacaattaagtcagaatctcctgggctgggccccagagattggtatttttaaaagtagttttctgataattttaatgtacagtgattttaaaagcttcttattttgcaataagtttaccttcacatagaagccataatgataatatagattttctatatattgcacacccagtttcccccattaacaacaccttaaattaccatggcacatttgtcaaaattaagaaactgacattggtatattactattaactaaactccagactctatttggattttgccaacttttttattaacattttctttctgttccaggatccaatccagttactatattgtgtttagctgtcctgtctcatcagcctgctctgatctgcgataatttcttagactttgtttgttggagtagtactggccaggtattctgaatgtctctagatctgagtttgtcagctgtttttctcatgataagacccctagttttcatgggttttgggagagaataccacagaggtgaaacacccttgacatctcatatcaggttatattccatttttgaaaacaacttcttgaagtaatagtggctgggtagagtggagctagcaggacccatcctactcttgaacagattgaagtacatcagtcagtagagaaaatcaggagggatgacatgaggccagcaatggagctgcatctcttgcaaataaatagtctcaattcaaagtcatgagacaacagttctattccaggctcatccactaactagtttttagggaagccaatcacagtcttctagtgttactttcttcatctgtacaatatagaagttgatatctgagtcttgaaattatgtgactctcaaactctggaatgtgttttcattagtcaaatattgtcatccacagtttcatttcctaagaggaatgtgttgtaatgctgagcaagataccctcaaaatttctggtttctacaaaagggcatgtaagggaggcctctctgcttcactgtttggtacttaagacacttgtatcctaagaatgtcaggtgcctggcaggaagaaaacaaattgcaaaaactgagaagaaaattcatcgcattcattcatctttgtttctggaactcactattttattccttccgttacaatggattaagaaggaaatgacataatttgtttttgaaatgtcagaagcagtgcagagtttagtactttaaaaaatagtttaatgttgaccctgtgcatacgtaaatcttaccagaaatgaggatgactggcttacaacgttagatactctaagttgccaataatttgtacagagcctgtgattgcaaaaccacaaacatttcacaatactggaaacctctaattaaccataataaatgacaggatgggtttgttttaaatacatggttaataatgcttactgctttaagaccataaactgtgtgattctctatggaggtgacagaggtaggctgcaaatggttttgcaaagtacgtttctacctctgcatgttaagtctgacccagaacattctactaatattggatcagcctctcatctgacgtaatttgcctgtgggaattgtatcggctgttaaactagctcctcttagtagctgtttgaaaaaaaaaaggaagaagaagcacaattctgtggtgtgtttcaaataactgaagccagtgtcctaggtactgagacaagaaagaatgtcaaacaggacctttaatgtgtatttatatttaaacatcagacctaacagaaaaccctgaagctttatacaatgattagagccttgtaagatcctaattaatgtattgtcaggtgaatggttggcctggcactcaagctgttctgagggacgcaaggggtttcaggtaccgcctaggaagaatagatgcagttgtagtgattcagtggcccatctgaaagggacatataaaggcagctgtgtctggtgtgctgtcttttcagactcacttgataatgctagtgtcagtttcaactgaagcgtgtgccagattccagacagcttgagctggcatttcagagaggttaattgtgaaacttgagaagaaaatgggcacattcttcctaagatggctattcaaatatagtctctttcctccccccccagagctttctgggtctcagtctcacttttgttctgcttccacgtaaaatgcatgaggaacactgagccttttccccttggcagctcctatattgccatctttgctgggactgctttgccttgttaaaatgtgccccgtgtattaaaatggaattgtcactgctgggtggtgcagcgtaacatggtttgacactaagcgccggcagctacagaaaacagacttttattgcatttattctttcagagacgggagtctctaaaggctcacagcagacattcacttagttaaatctgaatgaacccaaagtgaacaatctactctgctgtctttgtgttcatagaaacagcccccatccagcttgatatggctgtaaaacagtgttaagaaaagatgatcacacttagaatgcagaagggaggacttgaggctttcaaacagaacaaaaatattttaagtgggtggagtgggttagccacttgattttcttttttagcttcctctctattccctaaaatgtattatgtagaataaacacacacacacacacatacacacacacacccctacacacacacacacacccctagtattagtcttcatttataattccatgccattttaagacaaaggatttgatttgtaggactcttgcaagcaagctttagattcttaactgccttttatccagatgagtacccagagagagattgaacagggagggggctctgaggcataaactttgcattttgtagctctcctggaataaaaattccataaagtaacatctgtagtaattaagggcttacatttcctctcccattcatgtctctgctaggagagaaggttattttcccaaagagacaatagtggatcctgtgggaagagagaaagaacagagttagaattcttttcttcctggaaatggaaattttctacttaaaaaaaaaaaaagataaaaaaattgaaagacttacagtaaaaggttccactggaaaggaaacttgaaagagttaggaaaattgtacttagctgttcctaaatatttagaatgaggaaagattccgcttgcctttcttatccaaacatcttctgatataggggaacttgtgagtgagtagtaaacaaaatgctgtttttgtttttatttttatctattaaaattgcataaagagttttctttttatttggacatcaaattgattcattctgaagactttttttttcaaaataatacttatgtggatccattgggtcacctgatgatatacatactgagcgttaatgttaagttagtttcctacactctcttgtcatagcaggatcagctacttaaattagggtgaaatatgacaatgtagatccctttgttaaaacactgttaagaagttcaaggtggcaacagcagaactttaaaccaagtgcagggttgttctaagtgtggggctgtgtgtgaagacataggcctcattcctgtaaatttagccctgcttggcggtagagatttgtcatatccatcgatacagaaagatgcactctcatcacatgcttcataagaatgtacatctgaaaacaaaactttgtcagagaataattatagctcaaaactggaactcgttcctgatattatcttcaaacttgttaaacaagtgatacagatgccctgacttcctctctcagttaatttttaagaatttcccgggcaaaccttccactgagccacatgcttgctctctctaccacattgtaataaggacgcacgccctccaagctgcccagctcagccccctgccctaattacttcgccaaaagcctctcctagattccgtgcctcttctcagcatttctctcacttctgggattcctctcacatttgaattcttatagctgtaataaatatgtataacttacttgacatttgttagcatattttttttgtatcttgtttcctttgccatgtaatatggtcctataatatggccatgtaatatggtcctgaaatggacataaaatttagatgtaggaaagttttacaacttgagttgatgggcaccattccaagaaagctcatattaataacagcagaaaatccaaaattaaactttgccttttgaacacattttacacatttcacacatttcatacacattctttcatgtgtgtgtatgctgtttcttaaatgtatttttgcctctagtatactctttggaagacttaattttcttttatcagaattaatccttaattattatcctccccatccaattttataaaataaaaaaggccagatattatccattatttggaaactgctacaaatattactgtacttaagatatggtaacattgccaaaatttaaattatgttggtatggctcaaaatgttcatgctttaggttgtatgtgagatgccaaaatttggcacaagaataccagtttaggaatattgataagatagtatgaaaaaataggatattgtccaaaattcaatattgagaaagcatagaacctaaggtttgtgtatctataccttccttcaacatgtaggaccccacctaactctttggatgtcttacataaagtggattttcaataaaaatgtcataatgctgacgactacattactataccaatcagtcctttaggctgcaagccatgcaaataaaacacatcttgtcaacctcttttgtgaaatccatcagcagtatagcttagtagctatagcacaggctttactgttgcacagatgtcagttcaaatactgacttttcctcttattggaaaggtagtttatctgtttaagcctcagtgaccttattgatatgaatgacaataaaaagacttacccatcaggtttgctaattcatcattcaacagacatttgttgaacactttcaattgccaaatattgctgggtgaattaagataatgccgcagggttacctctgaacgagtgctcagaatagagccctccacatagacacctttcaaagagtgaataatactttctaagcattaatgagtttgtgatgttctcttatcaatctggtcatcatgttcatgaaaaaagttggcaattagggtacaattctcaaatcaagtatttctatggctttcttgttttcctttacttcttaagtttctttttcttgacaaccatatatgacctctggtttacctttttttcccagaatggagtctactgaaaaatgtgaagtggtaattcaacattttaatggaaaatatctgaaaacaccaccaggcatcccaggtaagaaattcactaataagtgactgaatgatgccgaggcttaaattgctcttattagaataagtacattgtaaagcccttgttgatcactgcagagttggggggtttgcttttcttaatgtgtattttcaaataatactgtgtagcaactcatctttctcaaaagctttttggtaattcttcttttgctttttgaatctctgctgctaactttctaaagtggattagaagaaaaccatagcaaagaatagttaaagaatgatgtgctggaagtgatagaattttatgactcagcattaatattaaaattccaatttccaagttacaaaatatccaaacaatgatattcacaatgaatcccacaaattgatgccagccctgaaacatttcttaccagtccatgacaagaaaagcacagaaactgagagaaagcatttagaaactagtatagcgatttgacaatgtcatgaaatctcagtgcataattttcttttacaaaaatatcagttactgacaaattggaaattttagaaaatactgtctatttatcagagctagtttgagaagccccaatctggactatcccagggcatttcacacttcccaaggcaaaattcctaaggttttatacacattataaagtgttctaattttatgctattaagaattgcattaaacatgaaataattggatttattatgtgtatcagagctacaaatgccagaacttgaggcagtagtgtatgtggaaggttttaatattaactaagtaaagttttaaatataattccaatataaaaaattaacaatggaatgaagtattaaactaagaaaaattacgtaaagattcatctgaataaggcagtttggtttatttgttggtcttttatatacagttattctcagaggagactaaggcgacttcttccatcttacaatatgtgactttaatctttttaagcttgatttcaataccgtttgctgtataatgcatctactatttaaaacccatcagagagttcagaggttgagcattttagttccttaaaatatattgagtttatagataagaggaagcatatacaaaaagagaaatatttttgtggagggttttgtaatgacttgctttttttaaggggggatgtcaagaatgcagaaagacccttcagacagacacttgcataatctgaaaacctaaagtagctgattgctggctaatcagtgagtcaacatacagtgaagactgtgccttgatttggttagcttccatgtgtaacgttcccttgggaactgactgcattatgatccaattggagacatatggtgttgttaagaaaagagttagcagttttcatctcagcatgttagctgcccttgcattttagcagaaatactttttttttttttgtataaacagacattttaagacactttactcaaatccgtcatcgagtaaaggagttgcattgtttgtggactttcctcttgtttgtcctatttcatccaacggatacctatttatatagaagttgttcaaactaggtgtaaattatataattatataaaaataaaaatgagcacactgtgtagaaattatgaatgattcaagttttagcacaagtctcaattttttgatttgttcaaaatattggtatgtcaaaaagacgtattgaaagccttcttgccctgattgatttgaaagtattttatttggttttccccaatgaacatattgctgactaatacaatttaatgctgaagacaaagaaagtcactacaaatccccaaatgtctgggcatccttccagaatatgcaggctatgatattaacctatctaatatcatagctacacccaatggaaacattgtgaatagcaggaacttggttatgagttttctcactcatttttatctcccgggaacaagaaagacaaaataattatgttcagttataaaactcttaggagagacaactgtatgcttctgagatttccactcatcataatagaactaaatacagaatattgatcatcatcagtgcttgaatctgcttatttataaattactttgaaagttagagttgaataaaggcttcaaatgctaagtaaagacatttaatctttgatacttaaattaggtgtggaagaaaagaggatataatacaagatatgggtattttgcaaggtaaagtagtaatttgcccttgttgagtataattactaagtcataacaggtataattacaatttgggtatatgctgtctgcctttattggtcctcattacttattacctggaaatagctgaaatcttactttcagaaatgtatgtcttaaccaatatttgattccatatttaagacagggagtaggatatcactatgagctatggcatcagatatttatactttttttaagtggccaatttccgaatctttttcattactttagagagtgtgtctttgcttgtgaatatgctcaactataattggtgtgacccactgaaaactaaaatacaatttttaaaatttgaaaaatctcagtgttctgccttatcaagatttgacatatttgaattcagaagtttgtggttttatagaactgcacattgattgtttaaatacattgctttaaggtcatgtagatgagggactcacagggatccaataatgatgacctgagatcctcgggtcttaagaaagctgtggaaagattgaatatgatgtcaatcatcttcttctcatactagggccctattgtattagtttgttttcatgctgctgataaagacacatccaagactgggcaatttacgaaagaaagagatttattggacttacagttccacgtggctgaggaggcctcacaatcatggtggaaggtgaaaggcatgtctcatatgacggcagacaagagaagagagcttgtgcaggcaaacttcccattttaaaatgatcagatctcatgagacttattcacaatcacaagaacagcaccggaaagacctgcacccatgattcaattatctcccactgggtccctcccacaacacatgggaattcaagatgagatttgggtggggacacagccaaactatgttgcctacatttaatataactctaagcaagtactgagcaattggtgccatattcatacggtctacgtctctgtttaggcacagtgtggggaaaatgtgcctgtgttattgggcaaatataatggcatttggtttctgtcactgttgacaatgacaattattcttaaaggagatgcaaagctaattattttcctgagatgatcatctagtttccaagtcccctactatgtcatttctaaaaaagaacaaggaaaaaatctatttcaacctaaaatgttgacattgctctgaatttcaaattctaaaaatttcatagttaaggaaatttgcaaggacatgtaacactgaccacatttatgttgctgccccatttcgatttgagccattgttggaataatttgctaattaaatatgattcatgttggtattgggttctaattcctgacagataagtgagttggaagagaactttacagatatctttttggaacacgctttatttctctgggctcctcctatttattcataaaagatctttttttaaatgaatacatcatggatgattgatgtcttttagcatatcccagaactacctctgttcattttagattataatgttatccccagattttggttccctggatcaatgaagctaaatatacatgccaaaaatcaaattattgagtactagtatacaggaagttaacaaagatcagtcacatgtattgctgctagcagatgagaaggagagaccaaaagcatgtgttaaatagtgtcaatcgtttgagtgttgtagccatcagcagaaagagatcattcagcgttttctcccttacctagagggaaaagaaaatacagcattccataaatgttgcatgtcctacatatcgatcttgatgtttttctggacaaaatgaaggatcattagttgcttgcctgcctaaccccagacatttctttgtcccgtaatgaattacacagcaatgttgtatagccccaaagtgttccattttcaaatctctggcaaaagcaaagggttagttcccagacacttcagggatctgtggggcatggacttgaaaggctcactttcaaagagcccccagagcagaatgatacaccatgcggaaaaggttttcacatgtagggacatgtattgatgaacagaacatgcaggccggtttgtaaaaaaataaatcatgttttgctcccaaactagacatttgttttttcctgtaagcacgtgctcctatcagtggagcaatcttttcagaataaaatggaataactaacttctggtatgctttccttactctttacataattgtttctaatcttaattgaactctaagaagtaaggaaaatttgagagaaagcctaccacattatgggatctttaaaaatttaacaactcttgtgactgacagaactttgcacaagtagttatgtatcagaggaataatatttttcgaataaataaagcatggggctttttgatgctttgacatagtaattttagtgttgtgtgttgatgtaaataacaatgtgtatgactatgtatgtatatgaatactttatgggagcaagcaaggaaaaatatttacaaaatgattttttaaatgatgaacacaaatgtttgtataaacttaacattcctgccagagtaaaatatcgacaacatatttaaatgcaatttatcttaaatttatcttatgtgattcaaaaatcagaatatttaagcaatagatttacaaatttttatcagtgggaaatgttgcagagctttgcgatctgtgtttgctcaatagtaacagtctattaagtccacaaatacaactatagctgagaagaggtaacaaataaaaaatgctatggtatatagttgggcaaaaaatatgtcttgattgttctgctcaggtggcgcattgcttctctccaaatgttttatctttgtgaaactaaagcatcacttgtataacatgctttgtgaacaatgtaatccccaattgggtatcattttagatttttcactggaaaaatttttgtattcttaatgttggtgatgtcttcagattatttctatgcatcaaacatactttgttgcttcatgatgaagaaaacacctttaaaatattattagtgaacttcacagagcagctggacaacatcatggtcaatggagtctgagaatctatgtgagtcctatggaatttgatatggtcaatcagttttcaacctttctatggagccacatctgacattgtgaaggtaaaaaagctgtgtgctggtaactgattagatatataagacagagagaagaggtgattaaatttctaaatctttgtatgagaagctaaatagagaaggaaaaagtttcatcttcaaaagaatagaaataattgaaatgagttttttgacagggctacatctactctacccacctgtgatttcggctgcatatgagatgcaacctagaagcatcttaccttatgtatccacctagtttcttcacttttccacctcaggacaaaatttataaaagcttgctcaatgagacagacaaacgtcttctacaaactttgggggagttatcaccccctgggatagcctccaatcaacagggtataggagccagaagataacattgggtctctcatcctttggaaggataattctgagtcacattctacagggttccttgagaggttatctacagtggtcacaagctcaatgaggtttcctttattagcattttcccccttccctgtcttttccttttctatcatctcagcttcctgacatcagctcccaattaaactaccttgtcccttgctctgattttggggaaagtcaaattcaagttgggggttctagaaattgtgttagggaactactttttgatttaaaacctttggctataaaggaaggtattcacttcactaaaatagtaaagtgaatttcatggcccaaatgtactgtttttatgactttttgtttttttaaagagcagagattataaatcccatagtagggttaatgaaggtgaacattagaggtagtagtcaggtagcaagccagggttgaaatttagcaagagaggtatggaaaaagacaagaaggacaagaaaaagacaagaacggtggcatggccaacttgagaacaactgaggacacaaagagttagatggctgataaaaatggaaaagatttagggcagccataaagccagtaaagtgaaggtgaggtgcaggcacagaaaattatcaaacagaaggtattttttgaggttttggtcttggataaatgtagaggtggacatcaaatatgacatccaatgtgtgaatgcctacagctggctgaagtcaagtgaaaaagatctttagtcgagcagctggaggcttacgattagaaggttggaaggtctttcactattaccttaaattttattacttaatgtcatacttgccttgattgcctcttgaagttctaatcttggtaggagcaggttaagtgaatagtgacaaagagggttgttttttttctttatttatctgattttgaattttccaaaccagagtatttttcattttttgtagctcaagggctgtatgcttagctctgtacattctcactaaatactctttggagttgtatagtttcatgaattaaatgacaatcatacatatatttgcttttaatgaactttctgaaggtatggggaggatgcacagctctgggtaaacaagcatgcaaccaatttgggggaaaacattgaggaaaatcttaaaatatttttaaatgttttaattaaaaatatttccatatctaaatagagaaagaaagcaagagtgagagagagaaaaatgtttgtaagaataagaaacttatttgagaaaaatttcagttacattttggaaagcctaatttttctaagactgcttttcaaggtgtatactgaggacctaattgtagtttctttaaagaactcattcttgaacagtgcaatgatgaattctgttttctggcatggcaaatggtcttgcctaattatactggaataatgtctctaaactttttgccactggagctagttaagcacaatgattatgcagcacttttgctccccctgccacgtcttcacatagaaagataaatgtcttgagaaaaaacaaaaaagagaatttccagtctctattatatcccttttggcataatattgttgctcatttctgcctagagaaagtaccacattaacatattatttctcttataatattatataacatactctgtaatttttaatcaataagatatggttaatgctttcttgaccatattttttctatagttacatatgaagcaccaataagtagcagcataatgtgtctggagtttccatttggttccagaatttgattgattaaagtagttgtaatttcatgggatagagaaaagggatgaggaggttttctatacatctccaaaatcatgaaccaccttcataacttatttctaaaatactgactccattcaggtctgcacgaatttctggactgaaaatttcacataaaaacttacaaaataaataataaaacactaattttgcttctaagaccatgttgggctttgccttctgtcagcatcactaatgagtagctaaaccatttagtgtctgtccggatgagtcctattaggaagctgagggttgagtggcttaagaccaattaacacacaagccagggaaaccaaattgaataattaagttcttagtgcatttcagaatctagaatctcatttaataggattgatttaagaacacattctaaccaatttttgtatgaatggatagtattctgaattaaatacttgcaactctctccttgtaaccatcaaaaagcctgctatacatacacctcatcatttatgatctaatttttagaatgatctaatttttagaatgaaaagtctgcaaaacataagaaaatattttaagagaaatgtgaatgaaaacagtaggcaagctctgaactagccattatgtgtttatcttactagctgcttcctcttatttcttacgtctttcagccctgaatgatgaatcaattatttgagtaatattttagttatttttcagtacaaaaaataaatctttcataggaaattggcatgcttatgaaggttcatttgtcccattagactgtaggtttttctgagaaagaactttgatgtttatctctcccatcttccttaaacaattcaaaccctttgaaaacaaggactgcaccttactgtttcttccaaacatctagcccaatgcctggcacagaacaataccaatatcatttgttaaataaataagcaaatacctagttgtggtagacagaataatggtcctctaaagatctgtaaatcctaatccccagaacctgtaaatatgttaggttacatgaaaaagagtaattaaggttacagcaaaaattaaggttgcagctggaattaaggttgctaataaacagaccttaaaataggaaaattattgtgttagtttgttctcgcattgatataaagaactacctgaggctgggtaatttataaaaaagagaagtttagttggctcctggttccacagggtgtataggaagtgtggctggagaagactcaggaaacttacatcagggcggaatgtaaaggggaagcaggcatgacctacatggctggtgcaggaggaagagagtgaaggaggaggtgctacacactttttgacaaccagatcttgtgagaactcattatcacgagaatagcagggaggaaatctgcccccatgatccagtcacctcccactaggcccctcctccaacactgaggattacaatttgacatgagatttgggtggagacacaaatccaatccattcccattaccatggtttatctgggtgggcccagtgtaattagaagcatcctcaaaagtggaggagaacggtagaagaggaggtcagagtgatgcagtgtgcaaagaattaacccaacattgccggccttgaagacaggaggcagcctttggaagctgaaaaaggcaaagacttggatttcccccctagagcctccagaaataaacttagccttgctgacaccttgattttagcccagtgagatctgtgttagacttctgacctatacaactgtgagataataagtttatgttgttttatgcctctaagtcttagatgattttttctagcaacaacggaaagctaatatactagtatagaacttgtattcaccgactatcatccagactattcctatattacattattaaatagtctctgaaaaactctcatagtttctcctgatttttaccttctttgtgagtttttattgaagaaaaatcatattcagtgatgcttgttaaagcacagtaagagtttttttcagcaccatcacaatagttacaggcaccactgcaatggagtctcttacagtggagatgagagattgggctcacctccgaatgcagcatagacaagtggaaatttacagccgaggagcagcataggaggtcggtggttggaaaattaccaagaggaagcatcaggggtaggattctttctgaagacaggccagggtaatcagacgtcacctagaagaaagttcagtaagctgactaaagtaaggccaaataaagaatcatctcagaatcattagagttgcttgtgtgttaaatagaaaaaaaaatcttgttagttattttaacttcacagtttctttataactgctcataagcacatattactatagaagactgttcagcatctgaaacaagaagctttgggaagtccttatatcttagagcacattgttttttattcaaagaaataaaatatgaacttaaactatctgacaccataagtatgccaggaaaataatcctaattgctaatctaaattcatgtaaatgtgtatctcttgggtctcaaccttaatacttgctttcaataattcctattcttgaaaagttattagggcctagaaaaacagaatggagctcctcgaggttataatcaactttaagttttagatgattatatctcaagcatagaccatgctcacacccctactcattgtcccatgaaacggggattgtcctaaagctctaaatgccctaaatctttcatctgaaagcttagttttgagacacacattaaaaatttagaggtggtgaatatgcatacttattatatatttagaaagatagataatgcttatgataaaataattttaaaaattaagtgcattttcaaaaatgtgtttcttagccaaagttattacacattccatattattcctatagcaagattgggaggctgtacatatgaaaacataaccattttctattgaactgagtgtgagacacattttggaccagaggtttatatcaaacagttgcactagttgacccgctgagatgccctaaagaaaaagaactcaagaatttaagttgatttccagctgtttgttattagagcaaatgttagtgctcccggagtgtttgcccgtggccatcaaccagcacctgcatctctttcattaggtagactgcccttaggctgcagcagcctgttttgcctgtgagcagtgagagtcagaagtacttgggaatttacatccccattcggggccatccataaacagtgattgacagctgttggagtatcaatatcccagttcttctgcttctgatgagaataccctgtgtatgatgtatactatctctatagctttcctgaaggattcaaacagttacagtttgtggggctgtctaacaccacatccttgcttgactccttcacttcctggtcccaattcccaagtcccttactggctttccctgaaaatacttcctaagaattcatgttcacaagcaaccttgtttcaaagtctgtttctggtgaacccaaactaaggtattatattcatacagacactaaatttgttattctatgatctattattttcattaatgttttgagttttacagtctcatctgtaaaatgtactcaagttaactgaatccctcaggatagattgagggaggtttcaaaagtgaatataaaattcctcaaattccctcacttcactggaaatagacatactagacactctaagtaaggcagcacttgtttataggtagctggcttctttataaaagggatacaccatttaaatgttgataaagtgtgtgtaacagcagataaaaccgtgatcaggtctcctgtgagtgagcaatcaccggccgattatcactgagctaatcacaatatgtcttaataaaggtccattcaaaagaatgaaaattgtatccatatataagacaaaggggttttaaaataaaaaaatcttagcaaagtgtacaaaagcactgaagaaaaatattgaaactaatatgtttttacacataatcattttaagatggtatagtgagcttgatacaaagggtgttacagagaccgctggaggttcctaagatcctttctggtggtctacaaggtcaaaaatatttttatcataatacgaattcattatttgcctttttcactctgattctctcatgaatgtaaagtggagttttccaggggctacatgatttgagatgtggcaaaagctggaatatggaagcaaatgttagaatccagctgtcttttattaagccagaaattacaaagccactcttctcttttttattctgtttttgaaaatagtgtttttaaataaaagtgtatgatttatgtcaatatgtaacaggactattattattttaaaataaataaacatctaaatttttttattttatgttttaatggtgtcaataaatataacgtgtctaaacaagttttgggggatcttcaataatttttcagagtgtaaagaggccctgagacaaaaacaaaaaacaaacatagaaaacagccgatatagagtcaaattcaagcccttcatcttagaaaagatgaagaaagataaccaagataaaggcgaagtttaaaatacgctctcactttttttggtcttattttgagaacctacgtatgttctaggaagctagttttaatggagcaattaaaaaataaatttcaattaaatgagttctaccagtttttttttatttttttattttttatttattttttttttttggtaaacaagcattcaggcgcctaatctatagtgagtgttttgttttatttttttaaatgcagaggcaatggttagtcttctgaacatttgcattctcattttcattagcaaatagcatattgtttgacagaatatgtgaatgttgtattaagacaatgtatttaagcagcgtgtgtggcatgctgcaattgtgggaatggaattatgtgaatttgtgagtagcatgcgaatgagtctgcccacaatttagggagagtttaagactaatatctaagagccagaaagctaaccacagatgccacatgggagctgtgttatcatcataagaactattctgtgttgcttcttttagtcgctgctaatttcagataatgttcatcttacatctggacttcaccagtgtgagtgctattcaccatgtgggacatatcttaagtacgtacgaccttccaggtttgctagttgtagtacatgataataataaaaatgataataatatatttaaacactagcatgcaactaattgaacactgtatattattagtgttcacataaaatcttaaaaaaatttcagaaatagtaaagtctcctattgtagagtcacataatcatgatttcattaagcttattgcatctttacctaatttgaatgatctctaaggaaagtaattctctagtcatcttttgtaactagttgtaattttatctgaatgaatccatgtaatagataaaataatttaagataaaattctcatataatttatttttaaaggacgcaactcaatatttgcttacatcatttaacagccccttcatttcttgcatcccaaagacaagcattttacatctttgctacacctatatgatgttaaagaaaagagcgccattcgtccagcttatgatatgctttctatgagatcctcacggccaggatcccctttgccctttatgaatttaatttctggaagaacatatgctacagagaataccacctttgcctttggaatcagatggactttggtttgacttatgctgctgtctcttttttacgttttaacttgaacaagttatttagcgtcttgccaggttcctcatagaacctaattgttccgcacccattaactcgtcatttaacattaggtatatctcctaatgctatccctccaacatggtacatgtatacatatgtaacaagcctgcatgttgtgtacatgtaccctaaaacttaaagtatagtaaaaaaaacctaattgtcccatttgatgttaacaatatctcctttacaagtgtttctagaattaactgagagattttctatagccccacaaagaattctggcaagaaatggtagatagtattagtagcattattagtggcatctgttagcctcatgagaattatttcatcaacatccaccttctaggctagaagtataatttaatagttgacgtctctgaatgacatcattgatgagcattatctggtacatggggtatataaggtacacatcctttgcaactaggtaaggactacccttccattttgagccttatgtacagctcattctagaatggtatccattaaattatacatgtccatgttagaggttgacagttttctgagataattggaaagagtatagcatcaaagaaatatttaccttgaatttgctctggtaattctcagattcataaacagtggtcccatttattatgggaccatggcagctgtgttaatgtagtcatacacaaatttgtatgatcccaaacttcttgtaaagttttcccagcatatcattgcacctctagttcccagggcctgcattcccctcattccactcttatttcccaaagaaattctgttcaactacaatacttttcatgcagattttcctgatttccaacttccctttccttaactctcactgtacggcattaaatgcttttctcctatactgggtgtctatttgtgacatgtagcctcatttaacaactgttgtatgcttatcttatcccactggatggcagaattatgcctttgttattcttttatctcctccaatacctaccatttgaacatacgatgtttgatatagacacactaaattgaatttaaaatagtcgagcatattattctagtgtgatttcctaatattgccttaattctctcttaatgcgttttattagtaaatgcttataaagtgaatgcagaaaccatcaactatgatgattccacatagaaatatatgacataatactttttttggtacattttaaaacacttaaacctcaaaaaccttctttcaaatggaagacaatgtttaaaagcacaagaacccttttcatttttataaagattaaattatctttccattctgcttcctgctttctattgctactttctccagattaatttttttaaagagtattgacctatggacattaaacacaaaaggaatataaaataaatgcgttggaataccaaacatcctgttggttgttacaattctacaacaacaattagatttttttttctaattaaaatcatttgaaatcacagtttttgtcttctcagaggtttctcttttcccaaagtttccttcaggtcctgtccttgtagtacattggggttgtagtggcctgtgccaccaggagaatggattcattaacctttacattgatttgaagtgtcgttcaaataaatacttatactctttttctctgatggcttagtgaagtcctttatcaatagcactgatatctccccttgacctttgcctcctgttcattcagaaaatttccatcaggctgttttatttacatttgcaatctcttgctacctcagttaagtttggcacagaaatgtattagtcctggatccaacagaattattttacactctatattcttttggcttctgcagagaagaaaatttctttctttgaatttcattttttaatttcagggtttaaacatttcctgctttctgcatatgtgtctttttgtattttgtctgcctgtttctcttgttctcttgtgactctctgtatatgattatttcaatttcacttcttcacaccaatatctactaaaagatatagttagagccaggaaatgtttctgatcccctgttcccaatcttatcaataaacttttttttttttttgtgcaaggggattggggaattactatgtgccaaatgttgtatttagtattttacagatttttaaatttatttctcaaacacccttagggaaaaagaaactgttccatcttgcagatgaggaggctgcattttatattatgtgtataaattgctttgatgcatacatactagtaatgacagtagtaaatgggctgattgaccccaggatttaattctgtcaccttattagatatgtgaccatgagcagttacttaacccctttgttcctcaatttcccctttggtaaaatgggaataactatagtctcttctgtactagtgttgcaagattggctatggattaaatacattaaactacatagagcaattggaatgtttctggtaaatactaagtgttacttaggtgttaacattgtactgctatgtcataggtcttttctttgatggagaggggatacactataggagaaaatatcagcaagaaattgagtgtcacttccctccattaccaaacttggaggaccaaccttcttccctacatgatacatagaatgaatattaatatcctgtattgggttaaatacatcatttctttagtctggtcaaagattcctccttgagattcagtttcatacttcaacactcattctaattttcagaatggaaatattgggccatccctttgacccaagccatgaacttggttttaacactgatttttaataagtggttcttttgttttaaaggaaaggtagcctatttatagaaactccctttagagaaacaatctttctttgaaaactaagctgtaaaatgatgttcttttgtatgtgtgtgtgtgtatatatatgtaaacatatatatatacatacatgtatgtatataaagcataagagctatgtctagaagaaaaggcacactattaaaaagctccaattagaggaatgtcagacccatattttctccatctgtatagtatcctttctttgaatgggccaaagaagccatggacactgagtgagatctgataatgctttttattccttgaatttctgagatgctgaagagaaagtgtcttgctatcagtattgtttctagggttgaaaagtacctcttaaaaaaacaattaccacaggtatttaattcaaaagacctgaacagagttccttctgtggttacaaggaagctgcaaattttgaagtcatataaaaaagtcacatctactgggataaaaataatctcagcaatcctagattaagatgaaatatatatatatatatataaacaaccccaaattttaataacatagtagaagatacaataggttactgatcgaaggcacaaaaagattgtatactttagaccctagcttttcttatgatactttgatgtcctttacacttgtagacatttgagtaagcttttttttttaattcaataaacaaatatctttgaataactggtagacatagaaatacattttcagtgtaagggttaagcacataacggaataattataataaaggaagtaataatgggggtaaaaaggagggattgataaaccctgcatggaggaaaggaatcaaggaatattctggagaagcatccatttttactgaaattcaaagataaagatgaaaggtatttccaagcagaaataggttgatgctttttgaaacatattgatatagttcaagtttaatcctatatgcttgactttaaattgatgagaactagtttttgctgaaaataaacaggatgagggaaccagatatgcccctgagcgctttgaattgattataactagatggagctggtttggtctagttaggtttgatttgaaactgcttgagttaagttttattcagtcagataacaaaaaaaaaaaaatttgagtgaatcttatggtttgactacatgctttctatattgagaatattaaacatttgtccattgcatttgtcattcatgctttcccttgattgctctttaacttttacttctatttcttaaaaataatagtttactttttatgtgaaataaacttctccaatgtgtcttttaaaaaaatcaccttaaatgtaagagatttcattaatattcatttctgtatcttttgctttttctctaaatttaactctttagtatatttggtatcaaataactatctaaattgaatattttcccaaaaaccagtatcctatctgcacttaaaaattaatctattcttttcacattctttgatatcaccttttcctataatacatgcttataccacttacttacctgtaatatgtgtgcttgctttgtgcaagaatttacaaatccttataatacatcttatctcacagaacaagtccctgctctaaatttttcttccagtttgattttttattgtttagctgttcttgctgttttcattatccagatctacttcaaaattattttgtcactttttttccaaaatataaagatatattcttaagatactatgttaaaatatagaacagttcttgttttattttattttattttattatactttaagttttagggtacatgtgcacaatgtgcaggtttgttacatatgtatacatgtgccatgttagtgtgctgcacccattaactcgtcatttagcattaggtatgtctcctaatgctatccctcccccctcccccgagaatagttcttaaaatctccccttttcttccccattgtgttcttataatctccctttcgcttccccattgtggtcaagccctccctcccacccttaatcattggaaaccatttctttgttttctatccttgtagttttctcttttccagaatgtttatgtaaatgaaatcaaacaatgtatagccttctaagtctgccttccttcacttagcataaggtatttacaattcacccacatggttatatgtatcattagtttgttccattttattgctcagcagtatttcattaaatggttttataccgcattttattctccagctgaatattttgattgctattagtttttggaaattgaatatgataaaatgcccacttttagtgctaaatcaatgttttataaaaattttggtattattaatcagggttagctcctgaatattatgaaatacctgagaaactcattgtctaatccttgattgcttgctaatgctacctcttatataactaaattttaaaagttgaaattggatcactgctgcaggctccctgagacaccaaaaaaccgtgagtctgcttgctttctcagtggggaggctagtggtctagggcaagttatcagccctggtcactggctgcctggaaatagactcagtgctgttgtgggggcacagtgggagtgagactggcctttagtaccgtgggctgtgtgggagagggttgaggcctgtgactaccggctttcccccacttccctggtgacctgtatggctcagcataggcagccacaatccccccgggaatataactccataagattgggagccatatcctcatcccccacagcagctgcagctagtctcacccaaggaaagactgaactcagacatgcttatccctgccccccacctggtggtctttctctacccaccctcggagtcgaagacaaaggtcataatctcttgggatctctatggccctgcacactgcctgagaagcctgaatacttaaccaggtgtccctagggcaagtttgtatccttataggaccatagctgacgcgctcttgaaagctccacctcctacctggaggccaaccaacacaaaaccagtgcactaaacaaaaacacaagcaaggaccctcacagagtccacttcactcccctgctacctccaccaaagcaggtgctggtatccagagctacaagacctgaagatggatcatatcacaagactctttgcagacactccccagtactagctcagagcctgggagctccgctgggtggctagatccaggagagcaataacaatcactacatttggctctcaggaagccccattcctaggggtaggaggagaacaccacatcaagggagcatcccgtgggacaaaagaatctgaacaacagccattgaatcccagatcttacctcttacatagtctacccaaatgagaagcaaccagaaaaacaattttggtaatatgacaaaacaagcttctttaacacccccaaaagatcatgtcagttcaccagcaatgaatccaaaacaagacaaaatctctgaattgccaaaaaaagaattcagaaggttgattattaagctaatcaaggaggcaccagagaaaggtgaagtccaacttaaagaaatcaaaaacacgttacaggatatgaaagaaaattcttcagtgacacagacagcataaataaaaaccaataacaaattctggaaatcaaggacacacttagagaaatgcaaaatgcactagaaagtctcagcaatagaatcaaccaagtagaagaaagaaattcagagcttgaagactgggctttcgaattaacccaatccatcaaagacaaagaaaaaagaatttaaaaaaaagaacaaagcctttcagaagtttgggactatgttaaatgagaatatgttaaatgtccaaacctaagaataattggcgttcctgaggaagaagagaaacctaaaagttttgaaaacacatttgagggaataatccaggaaaactttctggacttgctagagatctagaccccccaaatgcaagaaactcaaagaacacctggaaaattaatcacaaaaagatcatcacctaggcacattgtcatcgggttatctaaagtcaagacaaaggaaagaatcttaagagctgagaggcaaaaacatcaggtaacctataaaggaaaacctatcagattaacagcagatttctcagcagaaatcctacccgctagaagggattggggtcctatttttagcatccttaaacaaaacaattatcagccaagaattttgtatccagcaaaattaagctttgtaaatgaaagatacagtcttttccagacaaacaaatgctgagagaatttgctactaccaagccagcactacaataactgttaaagggagctctaaatcttgaaataaacccctcaaaaatacaccaaaatagaacctccataaagcataaacctcacaggacctatataacaataacacaattaaaaaaaagtatttagtcaacaaatagtaagatgaataggatagtacctcacatcccaatactaacattgaatgtaagtggcctaaatggtccacttaaaagatacagaatggcagaatggataaagattcaccagccaagtttctactgtcttcaggagactcatctaacatataaggcctcacataaacttaaggtaaagggatggaaaattatgttccatgcaaatggacaccaaaagtgagcaggagtagctatgcttacatcagatgaaacaaactttaaagcagcagcagttaaaaaagacaaagaaggacattatataatgacagaaggactagtccaacaggaaaatatcacaattttaaatgtatatgtacctaacactaaagctcccaaatttataaaacgattactactagatctaagacatgagatagaaggcaacacaataatagtggggactttaatactccactgacagcactagacaggtcatcaagacagaaagtcaacaaagaaacaatggacttaaactataccctacaacacatggatttaacagatattttcagaacattctaccgaacaactgcagaatatacattctattcatcagcacatggagcattctccaagatagaccacaaagcaagtctcaatacatttaagaaaattgaaattatatcaagtattctctcagaccacagtggaataaagttggaaatcaactacaaaaggaacgctcaaaaccatgcaattacatggatattaaatcacctgctcctgaatgatcacggggtcaacaatgaaatcaagaggaaaatttaaaaattctttgaactgaacaataatagtaacacaacctatcaaaacctctgggatacactaaaagtggtgctaagaggaaagttcatagcattaaatgcctacatcaaaaagtctgaaggagcacaaatagacaatctaaggtcacaccttacagaactggagaaacaataacgattcaaacccacgcccaacagaagaaaatacgtaacaaagatcagagcagaactaaatgaatttgaaacaaaaaatataaaaagataaataaaacaaaaagctcattttttgaaacgataaataaaattgatagaccgttagcaaaattaaccaagaaaagaagagagcaaatccaaataacctcattaagaaacaaaatgggagatattacaactgataccaaagaaatacaaaagattattcaaggctacaggaacacctttacatgcataaactggaaaacctagaggagatggatacatttctgaaaatatacaaccctcctagattaaaccaggaagatatagaatctctgaacaagcagtgagattgaaatggtaattttaaaattgccaccaaaaaaagaccaggaccacatggattcacagctgaattttatcagacattcaaggaagaattggtgccagtcctattgacactattccaaaagataaagaggggatcttccctaaatcaatctataaagccagtatcaccctaataccaaaaccagggaagaacatagcaaaaaaagaaaactacagaccagtattcttgatgaacataaatgcaaaaatcctcaacaaaatactagtgaactgaatccaacagcttatcaaaaagataatccaccattatcaagtgggtttcataccagggatgtaaggatggtttaacgtatgcaatctaaaaattcaatgcaattcttatcttaataccatattattctttacagaactagaaaaaacaatcctaaaattcatatggaacaaaacaagagcccactagccaaagcaagactaagcaaaaagaacaaatctggaggcatcacattacgtgacttcatactgtactataaacatagtataacataacatagtatcatataaacagaattaaaagcaaaaatcacatgatcatctcaatagatgcagaaaaagcatttgacaaaatccagcatttctttatgattaaaccctcagcaaaattgtcatagagggacataccttaacataataaaagccgtctatgacaaacccacagccaacattatactgaacagagaaaagttgaaaggattcccctgagaactggaacaagagaaggactcccagtttcaccacttctgttgaacatagtactggaagtcttagccagaacaatcaaacaagagaaagaaataaaggccatcaaaatagataaataggaagtcaaactgtcactgtttgctgaagatatgatcgtatacctagaaaaccctaaagactcacccaaagagctgctagaactgataaaataattcagcaaaatttcagcatacaaaattaatgtacacaaatctgtagctctggtatacatcaacagtgagaagctgaaaatcaaatgaagaactcaacccctttcacaatagctgcaaaaaaaaaaaaaaaacttagaaatgtacctaagaacatgaaacacttctacaaggaaagctacaaaacactgctgaaagaaatcatagacaacacaaacaaatggaaatacatcccatgctcgtggatgggtagaatcagtgttgtgaaaatgaccatactgccaaaggccatgtaaaaattcagtgcaattcccatcttaataccaccattattcttcacagaaccagaaaaaaaataaaaaaatcctaaaattcatatggaaccaaaacagagcccattagctaaagcaagactaaacaaaaagaacaaatctggaggcatcacattaggtgacttcaaactatactacaaggccatagtcacaaaaacagcatggtactgggataaaaataggcgcatagaccaatggaacagaatggagaacccagaaataagccaaatacttacaaccaactgatcttcaacaaagcaatgaaaacataaaatggggaaaggccaccctattcacaaatggtgctggcataattggcaagccacatgtagaagaatgaaactggatcctcatctcttccttaatcaaaaatcaactcgagatggatcaaagacttagatataagagctgaaaccataaagattctagaagataacatcagaaaaacctttctagacattggcttaggcaagtactttatgaccaagaacccaaaagcaaatgcaacaaaaataaaaataaatagatgggatttaattaaactaaaaagcttctgcacaggaaaagaaataatgagcagagttaacagacaacccacagagtgggagaaaatcttcatacatctgaaaaaggactaatatccagaatctaaaataattcaaatcagcaagaaagaaacaaacaaccccatcaaaaagtggcctaaggacatgaatagacaattctcaaaagaagatatacaaatggccaacaagcaaatggaaaaatgctcaacatcactaattatcagtgaaatgcaaactgaaaccacaacatgataccacctcactcctacaagaatggccataatcaaaaacataaaaaaaaaaatagatgttggtgtgggtttggtaaaaagggaacacttttacattgtaggtgggaatgtaaactagtgcaaccagtatggaaaaaagtgtggagattccttaaagaactaaaagtagatgtaccatttgatttagcaatccccctactacatatttacccagaggaaaagaagtcattacacaaaaaaaatacttgcacatgcctgtttatagcagcaaaattttcaattgcaaaaatatggaaccagcccaaatgcccaccaatcaatgagtagataaagaaaatgtggtatatatacgctgtggactacaactcagccataaaaaggaatgaaataatggcatttgcagcaatgccattgcaattgcaggatggaattggagactattattctaagtaactcaggaatggaaaaccaaacattgtatattctcatatgtgggagctaagctatgaggatgcaaaggcataagaattatacattggactttggggactcagggaaaaagggttggtggtggcaagaaataaaaggccacacactgagtacagcatatgctgctagggtcatgggtgcaccaaaatctcagaaatcatcattaaagaacttattcatgtaaccaaacaccatctgttaccccaaaacctactgaaattaaaaaaaattaaaaattaaagtaaaataaaatatttagccatttatttttcctgggaaattttaaacttcattatgatggattcttctaatgtacatttgatttattttatattttgagttggtaatatgtgcagttatttaaaaattcaagaacttcacagtgaaaaatactttctctttctttcctgtgacacagtcacccaagtttctccctagaaaagctattgtcaacattccctgtgtccagaggctgctcctgaatcccaaacgtatgtttatattttcactccaacagtggcaagtacccacccttctctaaatcttgtctttttttttcacttagcaatgtactttggagttcatttttttttttttttggaaaaaaatggtaattaaaaatttgtaattttaatggtaattaaaatcccaggctggagtgcagtggcgccagcttggctcactgcaacctccgcctccctggttcaagtgattctcctgccccaccctctcgagtagctggtaatacaggcatgtgccaccacgtccggctaactttttgtatttttagtagagacggggtttcattgtgttatccaggattgtctggatctcctgaccttgtgatctgcctgcctcagcctcccaaagtgcagggattacaggcatgagccactctgccaggcctggagttcattcttaagggtacaagaaaagctgtcacattacttttgatgaccatatagtattccattgaacatatgtacaatattttttatttaaatgttcaaacgtttccttacttacagagatctaggttgtttacaatctttatttattgtgaacaatataaaaatgaaaagtaaatgtctgtatcttttttctcattgatacaagcttatctacaagaaaatatataaactgtacttgctaggtaatatagtatatgcttatttaattttgataacttttgccaaattattttcctcataggttatcctaagtcacacccacactagccagtgtgaaaagtcctgtatcccaacaccttggccaatacaatggttatgaatctttttcctagctaatataataggtgaaaagtttaccacattgtagtcttaataataataagagaaatgtgagctaagattgaacatttttgatgtgcttagacctttaatacttcctgttcttgaactctcttgttcatattctttgcccattttttcaactgaattgggccttttaaaaattaattcccaagaactttatcacatgaaagttgatgtttgtaagttatttatcttgacttcattcatgatgtattttttttgccatttagattttttaaaataatgtcctttaaaaacttgaatggcaaaagagaaacataatgaatggtgatagacgtatttatcctttttaaaaatctgaatatctcatatatatataatgcccatactgagaatattaaaatgtaactgattttttctctagtaatttttattaaaaaatattaattttttgaagccatctagaatttattttagcattagttgtaagatggagaaaccaactttaatttaaatttttaaaatttcctgatggttaattagtcagttgttctactattgaataatacattctttgcatagaatccaaatgttacattttcttccattaaatcaccatgtatattttttattttcctgaaatttcaattgtcttaattgacttactagtcaaatcatgtgttattaatgtacatctttgataattagtattttacataatgtttgactatttgagggagtcattcccaccaccacccatcattcctcttcttttaaataatatttctggcttttttgcttatctattttacaataactttaaaatttatattttacctgccccctgcatatatgggcattttatgatttgtgcatccttaattcgaagtgagaggaacatatgattttctggaggaaactttcaactttgaatgcttgtgaccaaaggaaaactatgacatcatctggcagccatttcaaattatagccagatgttctaaaatggtttcttactaccccagaagtgtggctttaagtcacttccacttcacaggcattgctatcaattttctatctctcacaactcaaaatcttaaagacaaaaggtgttatatcatcttataactttctgaatttttacaggtgattttagctaagacaatccaaacatctggagatccctctccatttttctttgatgttaaacacatttttacagaagtaaatacagctctcttctgcactgacatagagaaaatactttttgctcaatatttcaaggacgactttaaaaatctattctaaaatataggtaaaaaagtagcatatgaaatttaaaacattatattaaaacaagatataattgcactataaaggttaaatctcatatttagcgctcacatgatatcactcaattttgtgaggcgtcttttgtaaagtatagtaggccattatgagtatttggttacataattcattttcacttaatgtagatagtattaatatattttgtgtggttcggttctatgaattttcaaagagcatgattcattcatgggtaatcagtaacccatagtccttgtatagtcattagaatatcctgtcttgatggttttctgtgaatatcaacgctctcagaagtatgccattgggactaagcctacatagatgtcagagattctctaaaatgacccagccaatactccctccacctttcatttctctggtattgtgacttactaagtgttttacaggaagaaattaaacattcaggaaagtgtgttaattttcaaaaagactccttttttgtgtctgccctcattttcttgctttttgagtcagttatcgggattttgaagtttaaaatgctgagatttttaaagtttcaatcgaaaagtattcatactttgacattgaataaaatttcccagttagcatgatctttaaaatacaaatttgatttacatttacatttcaaagcttttaattctttttggtgaatgtcccctgatactgcactctgcagacccattctatttgtttagctttggcttctcccctgccttgagtgttaaatttggtgggagatgggcaaggaaatcagagtgaaccctcacatctcagctctgatagaaggtgcacctattcctctataccagtatgtttaagaagtcttgtaacacatcttgcttttagaaatccatttatttttgtttttgtttttgttttttaaagaggttctcatacataagtggggtgaacaggtgaataacattgatttctttagaagacaggtattatgtaaatactgccttgtagaaatgcatttccatttcctgcattgatctcatcttaaagccttgcagtcaatcctattttttatgtgttgctgttttaatagaaattccatgttccacaatgaaagtaactgaccaaagatgttgaaatgatgtttaaaagcctcttatctatcatctttggaatttcaggatatcattaaaaaacaaaagcaacaaatgataaaaagaacaaacagtggtgtgctttagctgatattcattattcaaatagcttctcaatgtttttttcgtctatttttctttccttctagaaaattcctttttgaaagatggctttgaactcggaccagtctataaggaatagattttactgtttatcattaggaggagaggatttttttaccttacacatagtgtggttgaaccgatcattaagtgactaaaactctcctctatccctaaactttatcctattcaactaggaaaaccaagacaggacctcttcctcttgtagaacatcctgacagcgttcactaaaagctagtttgtgtatatctcagtagagatttccatcaacaaagcagtgacaatatctgccaaaggattttgcatttgtattgcaacttcatgagcataaaataaaaaaaacttgaattgccactatcatataatggttattcttatatgtaatcattattaccaacttatttatttttctaaaatcacattttattttttaatgaaatataatgaaaaatcttaatctccaaatttgttttttaaattatattgtagtttatcacatgtttttaagttaaccagaaacatctatgatcttgacctttaaatcatttattaaaataaaaacataggtgcctgggaccagaattcatttttataaaatcacaactgttcactatataacactatgatttctttttgtgtttctgatattttcctatctaaaagtgacatagggttaaaaaggagagaaagtggatgtagaacaatatccaaacattggttccctgcttcagtccataattgtcattcattttttattgcctcaattccagttatcaaaaggtaggtactaatccaaactgcatttcacctcctagcaaaggagttaaaatatgtcttattgttctccatgttctgtatgaagttcttactttgaaatgcagggcccttcattctttggcttaatcctctgaaactcactgaattttctagccttgtcatctaccaaaatgtgcacatattgttgtaccttgggctgtcttaaaaaaagacatcatgaactctggagccagactatctagatcagaatcccacctgtaccacttactagctgtatgacctggggcaagtgacttaacctctctttgactcagcattctcatctatataataagaacaattaaagtatctgacaggagaatcaaagcctggccaaatgaaacaggaaaagagggagcaaaaatgctgtttatttttctgcttaatcatttactccttcattaaataatcatttatacctcaacaacttccagttttaacaaaaatagatttgagtttacttaatcacagataaaataaaacatatggataaatggaaccaaagcaaagcaataaagaaaaatagtgagaaggaacattaaacttttggtagagcgtggacatgacatccaagttaagacctgaaatgaactataattgaaattccttgaaggaaaagctggccaggtgtggtggctctcacctttaatcccagcgctttgggaggccaagggggtggatcacttgaggtcaggagttcaagagcagtctggccaatgtggtgaaaccctgtctctactaaaaatacaaaaaattagctgggtgtgcacctataatcccagttacttgggaggctgaggcaggagaattgcttgaacccgggaggtggaggttgcagtgagcccagattgcaccactgcacttcagtctgggcaatggagtgagactccatctcaaaaaaaaaaagaaaaaggaaaagaaaaagaaaagcagaaagagaaacctagtaagttacataattcagcctaaaagttagaatgttagcttctggggaagttaagaccgtcataatttttttttccacttctgtatactaagaacctgaatgattcttagataacaatttggatttatttaatatttattaagtgaattatgaaatcagtgaataataaaaaagcatgtcacattttctattgctaaaaaagtaattttatataacatccatttctccaaataatatcctctctaatttaagatggataatgatgcctgatcttatttaagaaatgtattctattttgaagagcttaataaaaataattttgactcattataaacatggccaactccaactctcttttagccagttgtatctttaactaagctggtaatcagatgagaatcatgtgcacattgcattctatgaagcttagcttcactgatgtggcttacacgctgtttcagagatgtatggtcattctttggtcctttctagtgtatgtggaatcccgtttgatatagtttggatatttgtatcctccaaatctctagttgaaatgtaattcccattgctggaggtggagcttggtgggaggtgtttgggtcatggaagtggctctctcatgaatcgcttggtgctaccctaacaataataaatgagttctcactctaagttggcataaatctggttggttagaaggcatctgcctcctcactctcttgctcctattcttgccatgtgacgtgcctgcttccccttcgtcttctgccatgattgtaagtttcctgaggccctcaccagaagcagttgctagaactaggctggtgcagcctggaggaccttgagccaattaaacctcttttcttataaattgcccagcctcaggtatttctttacagtaatgcataaacaacctactacaccattggaccctgagattttgctgatggactgttcctactgaggcaattcctctcaattgttccttagctctctccccagggaagcatcttaaaaccacatgatggcggggcacggtggctcacgcctgtaatcccagcactttgggaggctgaggcaggtggatcatgaggtcaggagatcgagaccatcctggctaacatggtgaaaccccgtctctactaaaaatacaaaaaattagccaggcatggtggcgggcgcctgtagtcccagctactcgggaggctgaggcaggagaatggcgtgaacccgggaggctgagcttacagtgagctgagattgcgccactgcactccagcatgggcgacagagcaagactccatctcaaaaaataaacaaacaacaacaacaacaaaaacacatgatatgggccttgaatcatgaatgtaaatgggtgttcaggcacatgactttataacaatttgagactgtaagtgaatcatggacctatgaagcactactcgtctctgaagagatctttgactgccttgaatcctcaagtttaggagattcattttgtgaatgtacacatggtcatgtgcccggtacacagctatccacaggtgataaagagcaggacacagggcaaaacaatttgctaaagggttgggagaaataacctaataaattcaatttctttctcgcaggcctccctttaaaaagcatgtatcttatggtagcataactctatgcttcccattctcaactcatcagtactattttttgaagttgtaggttgttggttgacatgggcatttttaattttgttattaccagaccccatcagattccctaggcgtcatgtgtgttatcataggaaatacttctctacttgcctcttccattatgtcagctgttgtttgatggggattaggaaagggcacaagaaggaagctgaacaaaactgcacggctggtacctttctctgtcttttgtaagtgcttgttagcaatccaggatttcctgggaaaggacagaaatcacagatgtgtatatatgctctcacagaaagtggaagccagtaaccctgggaaattcgtgctcaactttggaagtgtatcagagatatactccacctctgaaaacctccaggctgagtatatatttaaaatgtatctttgcatttttcaggttaactacatacgtgactagcaagacaaaatacagcattattttcttttcatgatataactggataactaattgatttgtttactaattaatttccatttccccacaccagagcatcaactttatgaaatccagaatgcagttttgttcattgttatatctctagcctaaaactgtatatcacacataagctcaacaaatgtttgttgaattaattaattgataaatggtagtagaattagattctaatccataatacagaaatataaccttgagtagatttcttaaaatatcttagactcatctttctcctctgtaaactgggaggaaggagggaagagggacaacaagatgacttgtaaaaaggtccattccaattccagaattctatgcattgttagcaggaaggaatattaggctgacccatcaattcactgattaattgaaaaataggaattaatggaattttaccaaagggaattaaatggatttagtagctgcaatgtaccagcctattttgaataaaacacagttcctatgctggttgattccagaggggtaggaaatggatatgaacaaatcatataattctctatgatacaagaacaaaggatgaccagtgtataaggatacctcagaggtattgtgggttcagttccagactactgcaataaagcaaatatcacaagaaagtgaatctcaataatattttggtttcccagtgcatgtaaaagctatgtgtacaccatactgtagcgtattaagtgagcaatagcattgtgcctaaaaacatgtatattgggcttcaagtaatcctcctttctctgcctcccaaagtactgagattacaggcctgagccaccgtgcccacccccatgctccacttctaattctagttctcttgctatttttaccacatcttcagagacttccttcactgaagtcttgaaccctttaatgtcatccaggagtgtttaaacaccttcctccaaactcctgttaatatggacattttgatcttctctcataaatgacaaatgttattaatggcatctagaatgatgaattccttccagaagggtttaaatgtaattttccaagatctatcagaggaatcactatctatgacagctatagcattatgaaatatatttctaaaactataagacttgaaagtagaaattactcttgatccatgggctacagaatggatgttgtgttagcaggcctgaaaacaacattaatcttcttgtacatctccatcaatgctcttgggtgacccaggtgcataatcaatgagaagtaatattttgaaaggaatctttttttttttttttttggagatggagtcttgctctgtcacccaggctggagtgaaatggcatgatctcagctcactgcaacctccacctcctgggttcaagcgattctcctgcctcggcctccagagtagctgggactataggcacaccccaccacacctggctaattttttgtacttttaatagagatgaggtttcaccatgttgaccaggatggtctcgatctcctgacctcatgatctgcccgcctcagtcacccgaagtgctgggattacaggcgtgagccaccgagcccggccacaatggcttttacttagtcaccattccattagcccctaatgagacagtcagcctgtcctttgaagttttgaggccaggcattgtcttctcctctgtctgggaaagtcctagatggcatcttcttccaatataaggatacttcatctatattgaaaatctattgtttagtgtagccaccttcataaactatcttagctagatcttccagataacttgctgcagcttctgcatcagcacttgtttcttcactttgcagttttatgttatggaaacagcttctttccttaaacctcatgaaccagactctgctagcttccaactttttttctgcagctttctctcacctctcgtagccttcatagagttgaagagagttaagatcttgctctggactaagctttggcattaagaaatgtagctagtttgatcttctatccagaccactaaaactttctccagatcagcaataaggtggttttgctttcttatcattcatgtgttcactgcagttgcattttcaattttcatcaaggacttttcttttgcattcacagcttggctaactggtaaaaaggcctagctttcagactatcccgacttttgacatgccttccagactaagccgaattatttctggctaatatttgctagagggaagtgtatatttaaagctgtgagggtatttataatgaataatgataatattattccttctaggcataatagggatggtattaggtgtgatcgataggttaatactcccagaagtgatatagtaaatgctaatacaatgtttatgtaaatagagggcatttggtaggtatgggtatcataatctaatgagttgaaatcatttatttttgcttaaactacttaccaattcagctttcaggtttcaagtgaaagacacgcaattctttctttcacctgaacaacttagaggtcattgtagggttgttaattggcctaatttcaatattgttgtatctcaggaaatggtgaggcctgaggacaaagaaagagatggggaacatctggccaggaaaagagtcagaacatacgtttatcaattcagtttgctgtcttaaatgggtgctgttcatggtgccacaaaactattaacaatagtaacatcaaagaatatagatcatagattaccatcacagataaaataataataaagcttgaaatattgtgagaatgaccaaggtatgacacagaggaaggaaggaaggacagaagaaaagggaagggaagggaagggaagggaagggaagagaagggaagggaggggaagggaggggaagggaagggaggggaggggaggggaggggaggagaggggaggggagggaatggagaggaaggaggggaagaaaggaaagaaaaggagaaaaagagaaagggagaaagaaagagaaggagaaaggggtgacaaagtggcagggagaaaggaaggaaagaagaggcagaaggctgtgtcaaaattgtcctgaaatcagttttgtctcttcttttaatttattggcaaacaaaccaacacagcaactaactctatagcatatacagaatggaataggaggtgtttcctagaattggaaatgtgctaacactgttgttgttggcatgttatgcttttcaccaaagaatttagcaaaaattttaagaaggttaagttttatagaaccctcaccttagcctatttgaaactaagctgaccagatgacatagtgatgcaatttggtgtctatatccataataaccacatctgtcaaatgtgtattgtccgatattgttgcaacagtagaatttttgatgactctctggatttaattcatgcatcatttggatcttcgagatcattttatacacccaagttctttttgcaacatcaattgtaatgatttgtaccctctggtttttttttttttttttttgtaatcacaagggattgtacaatgtaatcttaatgttgaggatatgaagttattttttcttcaacctctttaaatattagcaactatttcacagatggtcttttcttaagcgatgtcattgatttaccagtgagagcagccaaatctcacttgggaaataatggtcaatgcctctcagtcatccataaatggagttgacctaatgctaaactaagctacaaggtaagagggccattgaagaaatttctaacacagatggtcaaatcaattcaaatattacacaatcctctatcttcctccaccaaatcatcaaagtttccaaactgtcaagcctttcacttttttctgagttgtctgagtgacaggatatgcttgagatttcccacatttcaaaacttgtctttaaatgcaatttcttcatgcatgatgaataatcaaatatttacacctaataaacattccctacaacttttttttagcacaacaaaatacactatggtaatactattctccttaatgccaatggcacaacaacaaaaacgaaatcctggaaggaaagacttttactccaagtcaatttaaaacttccttattcattttaaatatttcactgcattaatttttcaaagcaacaaaacaaatattcatcaagtgaaactaagcatgacccccctcagataggtacatctgttgctttcctgctgtatccctgaataattcattttaatacatttaaagtatacacttcattaaaacaagctacagtcatttacatataaaatgtacattgatgaaaacaaaaatgaaagctgttagaaagctgatcctaaaattttgttactccttgtgatttatatctagctgtctctgtctatttcctcctacaatgatggtataaaggcatctccacatcctctggcccattgggagctttagttatatcagcaaataggtgggaaaagttagctggtatattttgatactcttttcccacagcctttgttcatcatggacaacttcatcaagatttatcgtcactgtttgtccattttagctccctctgctcacatcacataatagatgtaccatgtatactgaatggcatttaggaatcaaagccaacacagagaatactaatcagttttaacttcttgaaaattaatcaatttgtgctggtctgatacagtgcagggaaaaatattcagttttattcactccctgcccttttgaactctgttaactgattatctaaatggttttcagaaaggccttaattttttttttttaccattatagcatttccccctcctccatttttatggttatgtcttaagtcaggaagggagaggagggaaggggtggagacaaagggagggatgagaggaaagagtttagcagttaaagacacattattaagtattccctttaaataaacttgctttctataaatatgttattggaaaaaagtattcatatgtcttacagataaagtttgaatgacatagaatcaaatataaaataatttatgagatattttctacgtaatactttatcaaaatatttgacaattgtcactattgctacttattagaaaaaaggctatacatcataaaatcatcaaatttcaaaggttatgtacaagaactatgctattacacatatttttatattaataactaatcatagcaatgcaattttaaaactctgtggtatttttctttctgaggatccagaacaatttctgtttattcaatagtgcactttttttggaaaagtaaagtgtaaaaacaaagcaaaacaaaaccttttcttttaatggtgactggctgacatcttactttatagaaactagtctctgagaacacacattttttttccatatcacagtattttgctcttttataggatttctcaaattttcccagttcatgtgacccttttgtcaggagaaaaattacctgaaactacatacctagtatctcactgcttgcttccccacctgttcccttccctcacaaggacatgagctcaagtgtgcatgcgtgcacacacgcatgcacacacacacacacacacacctgtaaacggaatgaataaagtgggtcataatagttgtactactgaaagtcagtgtaagttaatatgctactataggctagtatgaagaagttttacattatttatttaaagccatatcagaagccaaaactgtaatgtttcttatgttgacacagcaatgggggtcagttccaggttactaggagactccattgtggtttaactatgttactagtaccaaacttgaagaatcattgctttttttctttttttttttttgagacaaagtcttgctctgttgcccaggctggaatgcagtggtgtgatctctgctcactgcaacctctgcctcctgggctcaagcgattctcctgcctcagcctcctgagtagctagggttacaggcacccaccaccacacctaactaatttttgtatttttagtagagatggcatttcaccatattggccaggctggtctcgaactcctgccctcaaatgatctgcccgcctcggcctcccaaagtgctgggattacaggcatgagcacctgaccagaatcattcctcttaatcttagcttcctggcttgagaaggaaaatccaaatatttcatttattttttcttcctcatttatgagctaagtttttctctgccataaaaggaaaaacattctaaggcaaattccttctcactgtattttttttatgacacacagtaaaatatggtcgccttctagaaatttctgctctttttctcatgtcttacaaagcataagtgggaagattctaggccttaaagactggcctgggttcaaattataccacttctctttaccagctctttcatcttaatttcctcatccataaaatcaggccattcatacctatattttggggttgttgtgagaattacagcatatttgtatattcaataaatgggagctgctatcatatttattgacttttaggattaaattgtccacagcttccaacatctctttttcttcctttgaaactcccaaactatcatttgagagaccatatgtattttggatatttcacatcatgaatgtttagtcctggaaagtttgcttattttctctggtgtttttgtacctgtaacactcttgctctactgttaaaacctgacagcaagcctgagtataaaccaggagcccttaggaatatcagattaaggatcagcccaggaatctactttatgggctatttgctcacgtactgctatttatctatctgaccgggcagtgacaaagtcaataccaccaaccacagcctttcttctacagattcttagaaggctttctactgttctcgtattatatgaacagcaaagttgacctttagtccaagggtatggataaatatatctattgtgtgtataacataaccccagttctcacagcagaaagaaaaatatgcccgattatttgattgttttgatagtggtgttttaaaagttctagactagcacaatacttactgaaatataacccatgatcattttaacatgcatcgtccaaagaacattgtttgctcctgacaaatagcatgtgcccacgtgtcaatgaaataaagcaatagttattttagcttatatgcccactcaatttgtttatgccctatttataacatgctacttattttacttttagtctaaagccttgcatgtcaatatctagttagaagtaagtttggctgcgggtaaaattctgacagagaagagggacaggtgattggtggcctagtagagttagggcagtctgatataaatgaaaaaattaactagcatccggtgtagttgtaacatttataaaatgggagtgtgtatattcatacattttatccttattataagaccctttctgcccttaagatgcagcactctgaatggtgaatactaaaaacacagactcttgatcgaggtgagggagttggaagaggcaggacaagaaaggacgttgactttctgaaaatgggacgaacggctttatctgaaagccctagtactatagctctctgatgggatcctatttgatactcacagcccgttaaggcaaaagagtaatgtccttcttgggcaaatgaagaagctgaggctcagggagaataaatgacatagccaagatcttggcaaatccctttcccttttcactagttatatggaatcagaaaacttaagttttagttttattctgccactttcttagggacttcaaatcagtattttcacctgcataatgtatgataataacccgcggctatgcttatatttcctgggttattttttagattgaaattaagtggtgactctgaagatgcttcatgaaaatttcaaagtactgaataaatataaaacattatctaaatggcaaaatagaatacccagcttctgcccatccccatcacagcataatataaatagtttctattaagaggagatgtgtggacaaaggggtgttaaagacaaaagctaaaattcattggaatatctatcacctaccttaatatagtcacagtttgcaaactggttgtctttagtgtttaatagaatagagccaaaagatatattttatcaacacacattttatatatgtgtaatataacactatatattatatgtatactgttatatgtaatataacattagatatgtaaaatgtatgcatataatgtgtgatgaaatatatagacacacatacacacacacatttgaacactctcaagctacagaaaaattgaaagtgaagaataagaaacatatttttaaatcacctgagagcaagttactggtatggtatattctcaagaaactgcaattattgtaattattgtcaaatgagtaattataaagaatttaatcacatttaatttggcaatattttatgcatccagagtgcaaagtaggctatttcattcttctatctgtatttttttctaaactgcttctgatattttataaaaatcatacaaaatcattagagaacacctaatccaaatccagcatcacagataaggaaatttataccaagttaagtcattttccctggactaccaggtttcatgtaaatcactttatacaagcagatttgacaaaacttggtattttaactgctgctctcaaaaaaatgtaagactgaaattatttgtgttctttttcttcaaagtggtctaggcatattcatgtttgctataaaactaaaagaaaaaaatgctgacaaatgaaatatatacataaatgtcagtgtagaagccattggtttagaagatcatttttaattgattagggaaattaacagaggaaaacagaatcacaaaataggcccaaataatttataattagctctataatatatagacttatattctatttgctttaatgttttttgaatacatgccaagtaactcagaggtaccttgagcttggcaaatggcaaaaaagaaccctttatgtattttaagatggataacagaggctaaaaattatatacactatgtgccaatcattgagattcaactctacttttttaatactcttaagaaatgataaaatctgattttatgacacaaagcctatacttctaacactctgagctctgtatgtttttaaaaaatgctgccatatcttactatttatttctggaaaccagaaataggctagtcgttcttggaaatttcactctatttctaatttcttccttgtcaaaaagtcagtttgttcacattcagagcataaatgaaacctcaatttgcataatgccttaaataaatgtcaaaatgaatctgtgattttttctgatgtataaataaagatactagttgctttaaacggtttaatcaataacacagcttaccacagtttaccatgctttctgggcaaagaatctgcgtgtacgtgtgtgtgtgtgtgtgtgtgtgtgtgtgtgtgtgtggcaaaattctgttgaaattcccagtgatatgtactgaatgagtttaattccctattctgaaactactactactagtattttttaaattatctgttctgtgtttgaataaggttagatttctaagtttaatcatgcattgcataacaacctcttggttaatgatggactgtgtatatgatggcggtctcatcgtattataatggagctgaaacatttctattgtctactaacactgaagtcatcctaatgtcctagcacaatgctctgcttacatgttattggtgatgctgggtaaacaaatctactgcacttccagtcatataaaagtatagcaatacaattatgtacagtccataatacttgatcatgataataaatgactgcattaatggtttatatattttctatactatactttttatggttatttgagagtgtactctttgtacttatagaataaaaagtaattgtaaatagcctcaggcaagtctttcaggaagtatttcagaagaagtcattgttatcataggagatgacagctctgtgtatgttactggccctgaagatcttccagttggacaagacgtggagagcaaagacagtaatgttgatgatcctgaccctgtgtaggcctagggtaatatgcatatttgtgtcttagtttttaacagaaaagtttaaacagtataaatactaattttaaaaatagaaaaccacttatggaataaggatattaagaaaatttttttgtacagctgtacaatgtgtttgtgttttaagctaaatgtgattactaaagagtcaaaatttaaaaagattaagtttataaactaaaaaagttacagtgagctaagtttattgttaaagagagaaaaatatgttttataaattaaatgcagcctaagtatacagtagtatacagtaatgttctaagccttcacattcactcaccacgcactcactgactaacctggaacaactttcagttttgcaagctgcattcctggtaagtaccctatacaggggtgccatttttaatactttgtaacatatttttgctgtactgttttgtgttttccacactaatttttgttcaaaatatttgagaagaatgaaaagtagcttgttctttttcattccagagcataattgatttttaaaaacctatttgatgcatgaaccatatttcccttctcagagaactcgaaacctacaggtaaaacaagaacctcagaaaaagaacccagacaaaaagtaaaaatagtttaaaagaacagaaatcattttgaccactcatttatttattattgtttttatgtcactatgtcactgtgcaagtatttcaaatcagctaaatgacaaaatgcttcagctatgagctctccccttgattgtctaagccaatgaaaacacagacacaggtagcctgatctgataatctaaaagttaagcacaaaactgtttttgaaatgtaccatattttgtgcaatattgtgctgcaaatttaggattattttgcacttcctattgaccatatcaactgacagagttttgatggatagtgaagaaagccagcacaatttttaaatctgcttgggtaagcctcacactcaaagacgagcacagagtctacaagtaaaatgtaaattttatgtagcaaagaaaactaggaagataaaggttgctttagtctcttcactatgtctgttcatagaatccggcctattatatcatggctcatttataattattacaaggtgatggcaggtttctggactgtggtaaattctctctcactttattcaggtatgtcatgaattctatttcttacagcacctactgaatattattcgttgagtctggaatgttgatcaaggagctatgcttttaacgtctattacttttcaccaattaactatttgcagttgctttttcaaaaaggattgggattcttttgccatatagtggcaatggattttttccaatattataaacgtctgagtcctgaacatctgtatttactttcaaatgtcacaactcatctactttgactatatgcattattaatctgtaagatggttgcctgtgaaaatatatgcttcaatttacaaatagacaattaagcaggaaatcttttagaaatagagaaaaaacatgacggggctgtaacaggttcaaaggaaaaagaaaacaagtgcaaatacctgtaacaaaatagtaagaacataaaactgtcagtatcaagattgcttttcacattgcaacatgacaaaaatgtcactgtctcactaactaagcaactgtctttttcttctctgcataaatctagcctctaagctttcccaaatctttttcagaatgaagcagaaattctcatacattaataaacaaaataaaatcaaacattgtatatgattactgccaagacagaacatcttattggaagacgattttgcactgtgtattaaaatttaaaatatgcataacctattgacccaacaatcttatatgcagggttctgtcccacagaaataatagcatgcatacatacagatatttgtacaaagatattcactgcagtattgttagtaatataaaaaactggtattataactcaagtgtctttcaatgagcaaatgatttttaaaacttttcagtgtacaatgcagtactacacagacatttaaaaagaaatgagatggcaatatggtgacttggaaagatgttccacagcacattgttatgtaaaacaagcaagtgtagatcatgagatgaagctcaatctcattgtaaaaataaaataccaaaaaaataaaaaagtactatgtgaaggggtgtgtgtgtgtgtgtgtgcaatatctaactatatttgggcaatggaaaaatagtaatttcatcttctaaattctaattgttttcttcctcttttttcctccagcttaacctgaaatttcaattttttcccttcataagtgaaattgtctttgtatatgcaaaaccaagcacagttttctaatttaatgttaacaaaatttgagtcaaagctgtggtaacccacataccacattgattgggtggattacttctccaacaccaggtttactgtagtaatccatggtttatggcatttaactctcattaaagcacagttaacaggtacccattcagttatcaccatgcttcaggatcacacgctacttgggaccatttttgttgttcatttttttttgttagctatgtcagcagataatattcgtatttcaatacctctgtagctgagcatcaaagctgcataacttctacagcctttctccttcctgctatttgctcactgaccttttacaaatttaattatttatacccaatttggcttcttctctttttctttttgcctattaatgtatctaatgtagaattgatattgtgaaccacacaatggaatgtgctgtaggaaatctctcaccttctaaagccaagtgacaaatgaaaaggaaaatgccaaaggattttgcaatttgaaacagagtgctaaaataaggatgcattgctgaggttatggtgtaacacattcatttcctccctggcgggaagaattttacacaatacctggatcagatcttctgatcagatatttagtaaagcacccaagaatgctactgatttaatccaacatcactctaagaatgggctaaataatttaacgtctgggtaatttaacgcctggttaaactcttaaaacattactatatgcttcatcctgtcacctgcttgattatcacttatacttgttcaattgttttaagaattataaattataaagagacaaaagaataggaaaagccttagaaatgcgtaggatctgtccattggataccatggcttgaaaagaattataatgataatagcaatcctgatattttaataaagtttagacttactttaaaagatattgtaggaacttctactgcattatgttcaattaaggacattaaggaaaaacagtcagtgaggaaacattgatccaaaatgtaatttgtcacagtgatggaaaagacatctaaatgtatattctccttatttttccttaaatatgaaattatccaaatatctagttagtactgatttgcgtttatttcataacagtcaatggagaaaacaaaataaaacttaaatcacaaaagattgttgtgatctcagattttaagagtttaatgacatgttataagaaattaataatttatctaaaaatcctttttcgaaagttcattggagaatttcattcttgttattttgctgtccttattataataaggactacaactacatagaaatgatttgaagtgctagttatgttttcattgacagcactatgatcagtgggaaaaaaaaaaaaagatcctgttaaaatacctaagtcttacttttgtttctttaatcatgggcaccctttatgtgtgtgcatgttaaaccagattagcatttgcgcatgcacatgtatgtatatctttttattttaggtgagacaataaatcactgatatattagtaacggggccttcaactatgtcaatacttctgccaatgccaattttcattactaatattaaattttatcatatatttgattgataaatgtttgttttttgtttgccttaatagaaggcaaacagtttatttcagagcttacatcttttgctcttgcaaggctgtcactatcttctcacagatttttttttaggaattaggagaaagtacctgtttctgagcaatcctctcaaaagtctgatgactatgatgattaacagtacagactgatatttcctgtgaaggcagcagtttaggccgaaatgctttctaatgtatgaagaaaataactttcagtttaggaattttagaggaaggaaaaaaatcacttaagcagcatctgtttcaagtaaaaattctgttgctaccaccccaccatcatggtccttaaattttcttttcattgattagatgttttcaaattttgttttacttcattttactattatattgatccggtgttttaaggaatttgcttgcattcttatcaaggaagcatcgttttcaatttaaataggtcattatggttagaaatctaaagaaatagcatagttcattatagtatacgctttgttaatagaagtaattattttcatccttattataatttgacacaatgtttcctttaaaaaacagtgatcttagaaaatactttaggtggataagaacaagagacatgatgagtaatatctaattagaggtaggtgaccttttaagctctaacaacattctctacatctccagttataaatttttatttctaacttaagaaattaaactaattatgtattatggagggaatattagatccttatatgtcagtgcagcttatttctaattaatggatggttgaaatcttcaaactaccttggacctatttggcatttgaggaatctcctttcagatgacatttcaaatgcacatataaacacacgtacacatatgcatatgtgtgcatagaattgatattgtgaaccacacaatggaatgtgctgtaggaaatctctcaccttctaaagccaagtgacaaatgaaaaggaaaatgccaaaggattttgcaatttgaaacagagtgctaaaataaggatgcattgatgaggttatggtgtaacacattcatggtgtaacacatgtatacatatatgtgtatgtgtgtttccatacatttttattctaagacaaataccatagtaataattaaagtaattatatttctcttaacactcttgaaagcttttttccaagtaacaggttcatgatatactgagctattttttgttacattttgtttttacaacatactaatattgatttatttgttagacaccaatagaaaacgcaccaaagtaataacaaagtctctcctagtagagaagcctattacttacttttgatgtatgtatattttcccaaactcatttctttggtaatgaacattgtctccataaaattgcattatcgaatagtttgtggaggactactgttgtggcatctgatcccagcataattctttctctcttttaagtctaaatttaagtctaaatcctgtggtactggtgttggggtaaaaaagaaggaagaaaggaaaatattttcagtccctgggaacatgagggcatttttttctctctcaggtggtgtaatcttcaggtaatcgctgaagactggggctctccttggggctctctagtgtggtcttttggagctgctccacttcacagttccatgacctgcaagagtcatctccagatccacctgtactggctcagctaccatcctggggcacgcctggaagcccacacggcctctggcagctgtccagtaagcagccttcttaactgctgtacagcaggacagtctagactggctctcttctgtgatgctcactacatttattctacaaatattttgaacaccttctataagctgggttctattctaggttcttgagattcattagtgcaaagccacaaaaaacccttgctctcatggagtctacattctaaggtctcataggaaacacatgtaactttaccatgctgaagagaaggcatgaggctgcttcaaaacttgttccctctcccccattattccctccagtttttttctctcctgctaaattatacattgctcagataatcaaatgcccacactaagcagatgtccaactagtgattcagatctctgtgtctgcttctcaaaggtacccctaaatcttttgtccattaggataaagatgagtgacctcaaaaatgttctttttttctcacttccccagacttcctgcattgatttggagttaggttgaggagctaaccatggttgctggtgattgctgagggtatgctctgccgtttcttaggaagttgtggaagatattggtctttttgtgaatatgtatgacactattcatttcctccccagatttgggctctacatgtcaatccctgtggaattgaaaaagtcatgatactttgttgtaagtccatatattatgatagaaatagacataagatgttaaagtgggacttcttaaagtggggtttcaagttccactgagatattgacaggacagttaggatccaaagtgagtgtgagtcagatgtcctcccctccctaacatgtggaattacagtgaaaattgttccaagaatgtgataaaatttttggatacaagccccttagataaattaaaaatataagaataggtcatagagaaaagagaagggagggattggttaaaagatatcttgggagagagccattaccctgctacaaatcgttcccctcccaccacctcccctcctacctttgaggaaaggcttagtgggaaagttttaaagagaccgtcattgagtgctttgatatgtttgttctcctgttggaagattctaggtattggtacttgacttagattcaaaaaagctaaaagcaccggtgaactaagatctaacttgctctgcccagtttcccaaaatctagagggtcaggtaagagctgaccaactgttttggttgcaaaagcaggagattgctgctgtgttgggatccagtctgcccatctaaaacttggaatggaaggcatatttaaagctaggttagattcaaaggtttgactattacttggaatttgcatttgaagtattaagatggaaaatagttttattgccaaaagtgagaaagagtttttcttttttctgagagtaatcaggaaagtctagagcatgtatttgccgatgccttctgggtgatggaaagacgatgtctcctacttcatgaataaagttcaatgagatggtagaacatataaataaattgcattgtcattatactttgcttattgatttttcagcttactaatcatatgtgcatctgtgtatgcatatcacagatgtacaacgcacacacatatgcatatataaaatattatatattatatattgctgtagtacctgttattttcatccagtagtgtatcatgaacttctttacataaatatatgcattttaatgtttcatttgtcatgatatttaactaatacccttttattagacataaatgatgtttccggttttctatattaagaataaggctgtgagaaacatacctgtggctacaccttttcataggcccttaactaattgcttaggataaatttcttaaggccattctttttttcaatattttatgggtcatcatacatgcctaagtcataatgtggtaaatattttacaaccaatcctggaacattttattcatataaaaatagcatttccataagattcttggcaaaatagctccaaaaaggcatgagttaggatgttttactaagaaagtactgatgcctgataaaactatgatgtgctgtacagagcttcaaaattggtatctcttttggcttaggattgacttggcgatgcgggctcttttttggttccatatgaactttaaagtagttttttccaattctgtgaagaaagtcattggtagcttgatggggatggcattgcatctgtaaattaccttgggcagtatggccattttcacgatattgattcttcctacccatgagcatggaatgttcttccatttgtttctatcctcttttttttcgttgagccgtggtttgtagttctccttgaagaggtccttcacatcccttataagttggattcctaggtattttactctctttgaagcaattgtgaatgggagttcactcatgatttggctctctgtttgtctgttgttggtgtataagaatgcttgtgatttttgtacattgattttgtatcctgagactttgctgaatttgcttatccgcttaaggagattttgggctgagacaatggggttttctagatatacaatcatgtcgtctgcaaacagggacaatttgacttcctcttttcctaattgaataccctttatttccttctcctgcctaattgccctggccagaacttccaacattatgttgaataggagtggtgagagagggcatccctgtcttgtgccagttttcaaagggaatgcttccagtttttgtccattcagtatgataatggctgtgggtttgtcatagatagctcttattattttgagatacatcccatcaatacctaatttattgagagtttttagcatgaagggctgttgaattttgtcaaaggccttttctgcatctattgagataatcatgtggtttttgtctttggttctgtttatatgctggattacatttattgatttgcgtgtattgaaccagccttgcatcccagggatgaagcccactcgatcatggtggataagccttttgatgtgctgctggattcggtttcccagtattttattgaggatttttgcatcgatgttcatcaaggatattggtctaaaattctcttttttggttgtgtctctgccaggctttggtatcaggatgatgctggcctcataaaatgagttagggaggattccctctttttctattgattgaaatagtttcagaaggaatggtaccagttcctccttgtacctctggtagaattcggctgtgaatccatctggtcctggactctttttggttggtaagctactgattattgccacaatttcagctcctgttattggtctattcagagattcaacttcttcctggtttagtcttgggagagtgtatgtgttgaggaatttatccacgtgcacattgtgcacatgtaccctaaaacttaaagtataataataataaatttaaaaaaaattggtatctcattttccatcttttatggaccactttctagggaacagtaagagcctggaaaataactaatgctaatttaggaagacagatatttaacacatggccctctcatctgctcttccttgccatatataaagttacagaatgagtgtttccttgaaaaatctaagaggatgcatctcttggaggaactgatgtttggaaaaagacatcctgaggaggaggggaacaacaccactgtaatgacaaagaagtctatccaggcacaattgattgaacattagcttaccttcattttctttctccctaacacactctgaagggacctggtgtctcatcttcaactgcagcacaagataagagcacatttagttgccactttactttagatgcaggaaccagcattgaccctggtcatttaagatcattcctacatttctaggtttcttatctgcactcgagcttccatgcacacccaaaaccttagatatcacccatgtcaaataccctgcagcaattattatttatagtcacctcttttagaacttcgaagacttaaaaccatagttatatctcattttattttctcttagctttcacatttcaccctaggaaacaatatactataatgtttaagagtatgggctctggagtaacatctggttagaagttgaaggcaatccctctatacctcagtttgttcttttttataatagggttaaaattaaaattaggaacagggggttgtcaacaagtgggtaaagaaaatgtggtatatatacaccatggaataatactcagtcataaaaaggaatgaaataatgtcttttgcagcaactcgaatgcagctggaggcgattattctaagtgaagtaactcaggaatggaaaaccaaatatcctttgttctcacttataagtgggagctaagctatgaggatgcaaaggcataaaaatgatataatggacttcgaggactcaaggagggagaagggtgggagggggtaagggataaaagactacacattgggtatagtgtacactgcttgggtgatgggtgcaccaaaatctcagaaatcaccactgaagaacttatccatgtaaccgaaaagcacctgtactccaaaaactattgaaataaaaataaaaaggaaaaaaaaaagaagagagggttatgagtattgaattgagtagtatattagctgttactgtagcaattattggctacttgccatatctcagtaaacattaatttttagtaatttcatagtccagtttggtggatgtatagggagtatggattctaattcacacctacatgctgaaattcagacctttctgacatatggtttgacctctttaagggcctctcagtcttttactggaccctcttctttccagttaacagacaaaggaagagacaaaacacagaagactgcccgattagcaaagccaaaaagtcatgtgcatccccctgtgcgcgcacacacagacacacacagacacacacagacacacacacacacacacacacacacacacacacacacatttcactggacagacctccatcatatgacccactcccctacatgcaggtgagctgggaaatgtaatctggttgtatgcccaagagaaacacaacacagatgttggtgaacatttcagcaagcctctgctgttattatcatttggatataaaaccaactttttttttgttaattggcacaacctctaagcattcttcctttgattgttatttgctctgttgaagttcaatgcagccaagcccagaaatcaaaggttcttctggtgcttagaaaccctttaatataaatatattattatcgaggcttataatgtgaagttctttacatttttgcataaaaagtgacccatagaaaatagtcattttcaaacacagaaaacttttgtgagtcaaaacagttggcacagagtacttaagacatgcttgatcccaactggcacctaagtagataaaaacaaataggttgggtgtggtggctcacgactgtaattccagcactttgggagacccaggagggtggatcacgaggtcaggagttcgagaccagcctggccaacatggtgataccccgtctctactaaagatacaaaaaattagccgggcatggtggtgcacacccgtaatcccagctacatgggaggctgaggcaagagaatcgcttgaaccctggaggcagaggttgccgtgagccgagatcgaaccactgcactccagcctggatgacagaaggagactccgtctcaaaaaataaataaggaaaaaagtatatataaaatgcctctaattagttatctgttattctttctaaaaattaaaatgggttgcatttccaaattttcttttctttttttttttttgaggcaaagtctcactctgtcacccaggctggagtgcaatggcacaatcttggctcactgcaaactcctctcactgcaaccaccaccacctgggttcaagcgattctcctgtctcagtgtcccgagtaactgggattacaggcgtccaccaccacgcctggctaattttttgtatttttaatagagacaggtttttaccatgttggccaggctgatctcaaactcctgacctcaggtgatctgctcgcctcagcctcccaaagtgctgggatttcaggcatgagccactgcacacagccacatttccaaattttctaaaggcacattttgaaagacataaattgaatttagtaattgcatgttttcttaaaatttgattatttctgattgaatctgaaagtagaagtcaacatgcatttgggaaagaaaatatcagaaaaaggaaatgcttttgctcagcatgcttaatatagaaagtaggtttattaatacaatgtcaccttccattttggaagattatattactagtggaaactttgcctttgtgggctgatagggaaaaatgataaaccatttgaaataatttttgaaaagaaatagaatattataaaaaaaacaagcagaaggagccattgtagtttcaacagtctacttcagtagcccttctacagttaatctattattgaaccaccaaatataatcatgcattcattcatttgttccatcgtttattgaagattgattgccacctgctatatgctatactctatgttaggtcagatgtttttataacaaattgtccttaacactatgttcaatgtttcagcaatcttctaatttagatttacatatacaaagatatataaatgaatataggtataatgagaaagatatataattaaccagtgttacattcgacattgtgttgtctaaatgacacatgagaagcttatttaatattcaaattctatatttttcactgaaaatcttaacttcaatcaataactagtaaatgacctaagaagttgtgtaacttttctcttctactgacagtataccgcattgttttttctcctttcatttagttactattttaaaatttttcttctttaataagtaaaatacaattctattttttttcaaaactgtgagacgatgtttttttacattttttgtccatgtgtgtattttttctattagttctcaataatttatataatttttttagttgtcgtttgatattgcttgaccccactgagagaatttctcaataattcaggcttgatacattgttatgaacaatgtctttataaaatgttttattgttgattatgataatctttaaacacaaatgttgtgaaaagttttatatatttatgaatactataaaacttccaatgcgaccttgatttcctccacggagactgaattgggataagaaaaacacttatttgctatgcaccatttattagtcaaccaacataccataactattggttaatttcttcaagcatcccattttattagtaaaataataatcagtatgccttttatttacttcatgtccctgaaaatatataatgtgactccttatttggcctaatgttgaataagcataaattagttatgttgaactcagtaattcaatgaaagttattatctccatggtagctgcttttgcctttctcaaaagcatgaatgctaagttttactatgaaaacccacataactaaaatgcaaagaagtggactctaaaattgcatgaaatagttcttaaaaagtagttttctagacccaggaaattttagtaaaattaagaaaaacaatacattccattgccacccaacaagataaaaaagatgtcagggacttttattatgttctagactcatgatgttaagtgaaacatcaagtgttctattcttttcatccgtcaacagaggtagccaactactctcctgaagtagtgtgtatcctgcccttgcaggttgttatttcattccatatccatagccgtgtattacagaagtctgcaaacttttacttaaagggccaactagtaaatattttaggttttgtgggtcataacctctctatgacagctactcaactcttctctggtggcaataaaaagcagccataaacaaggtgtaaataaatagaggtggctgtattccaagaaaactttatttacataaacagataacagaccagatttggaccacaagccatagtttaccaattcttcatgtgttgtattagcaagggtatttttaaattttttaaatagcatcaaaatgtattttagcaaatttttaattgaatatcatggttttgagatttacagatggatctagcctcttcatttcacatgctatgtcaaatcatttatttatctaatcttttaattatgggcagttatttaatcccccattttttcacagttatcagcaatgcagcaatggttgttcttcaacttctctttctgtgtatatatgcaaaagattctctgtggtactgtattgactgacattcagggtacttatcagattttctatgtctaaattagcaggctcaaaagacattttctagtatatgaaaatcaaggatagctgagatcagctaacttttttggtgaatatagactgaattaaagtgtcgaagccactgtttttataatctactccttatataaaacattaagtgaggccaggtgcagtggcccatttctgtaaacccagcactttggaaggccagtgcaggtggatcacttgagtccaggagtttgaggcctgcctggccaacatggcgataccctgtctctactaaaaatacaaaaattagctgggtgtggtggtgcatgcctgtagtcccagctactcaggatgctgagacatcgcttgaacctgggaggtggagattgcaatgagctgagatcgagacactgcactgcagcctgggtaacagagtgagacttcttctcaaaaaaaaaaaaaaaaaaaaaaaaaaaaaaaaaaaaaaaaaaaaaaaaaaaaaattaggtggcagaaatggtaaatttaaatactatgatctatttatttaactgaaatgttgccaaaaaatagactttatttttgaaggtgacaattgaatcctttctgattgtaaaacacaggctttttctattagaggattgatagatttgatctattaattagatcaaatcctctattagaggattgaatctatttgatagattccatgttaatttttctggtacttcaatcaaatgccattttatatgctttaactttgtttttattttcctcttgcactcaaaccagctaattcaaaggatagtgttcattttattcaaacttagctatttataaactcagaatacaagtatccccttttgccctaagatattttctgtcactaattaggttttgctttgcaagattatatcattcaaagtccttttcctgttactcaggtaaactgtcattggatagacagttcaaagtgttactttgtaaactaattaatgcacgtggtgctacaaaattccaagaatacaagaaagtccacaataaaaagtaattctccctgggcatggtagcaggtgcctaaaacccagctactccagagaccagagactgaggtggtgggaggattgcttgagcccagaagattgcgaccaacctgggcaacaaagcaagatcccgtctcaataaacaaaccaaccttgctccagtttccctcctgggaagcaaccattgttatcagattcttcaaccctctactagagatactgattgcctagaatggtcctgttttatgactggaatacactggcttcctatagaagtgcaaatgtgaatccaagttcatatatccccttgctgtttttctgcccaaatggaattcattatccaaacagccaagtatacatatctgtcaatatgatacatttttagagtaagttttcatataagcatccagatacaatttgatttttcttttatttatctaaaattttgcttgggttatgaagtttcttgatttattttctacaactttccctactttccattgtcccagcattttgtatttagctctttaattcataatcatggactctatcttgagtaagctcctggacctcctgattattttagtcttatttcaggcttatttctacacctggaaatagtctacaatgctactggacaggaatcagggttttttacatgactcccaaaacaaagtgggacagtagtcacttaatactgagttatacaagcaaagctgacaagcataggcttataaagaaaccatataaaattaggcaccatttctgccttccactaactcatgtttttgcaatcacaaactaagcaaactacctgtgaggaactacaacactttttatattatgaagccagaatattggaatggtttcctatacaattattctctggaaagtacaacgaataattccaggagatctgaatcataggaactttttaatatttaagaagccgaaatgtaggctaacaaccaagtctcattctaggtttttgatatcagagtaccagaagaaaatatgttttcagaatatcattaagttcctgcctttgtttctttgtgcttgcttctagccacatcagattctgatggaaagtgtatccattttttctttctgtcattagaaaacagaaatctgaaaagaagtgaccaggaataaaatacatctggctcttcttctcaaaattcaactaagtcactaattcctagggagcattattttttcatcatatgttcattaattgggtcattacttcaaactcaaatatatgattttaatttttcaaactgcacaaggatggtaatcctaaaacactgagctaaagctttcttgtgtgcttttcatcacagtggcaggtgcttctctttttttcacatttgctccaacacacttcatccttcagaacactctgtgtcattcaccacttcctgagtctgagtgtgtgactgcaagtatttgagaactttatttctcacttccttcagaccagtgaatgcctaattttaaacagactatttctaccagtttcccagtttaatctctgttgccatgattaagtagtccaaaacattcttcaatgatgtctaaggctttggaatttaaaagtaaattgcttctgggaaaaacaaatcaaacttgcattgcagacctaaagaaagtgcattaaaacatattacactgcactttcttggtggaataaatggatagtcacagtaatgtttcttctagcaatgtcagatttggagacacttcgattattttggctttcgattgagtttctctccaacactccactctctatttgatgtgtctacatatttcaatgtatccaatgacaatttatgccataaattattggctatatagggccaaaaattcagagtagaaaggtaaagcaatatactagagagagtgcatggagatgatatggatttgatttgatttcccattactgatttgctgtgtgacattgggcaaccttagcaggccttcattaatatcgctgttcatgtctacctatgatggtgtcatggctgccatattacatttgaggtatcttttctggtggaaggtggtagggttagtggtaagaaatattctaaaatcctccagtgtttcataagcacattgcacattctattttaaaaagtttgaaaggaatgcttagtaaaatgtgatacttggaggatttcattgtaatttgttgcttagttcaggaaagtaaatacctcactttttctagcattgaggagataatgaatatttacatttttaaattcacatttaaaatttgtgttgcagcttaactttaaaaattacttttattaaagtttaacattgtgtatagagggaaaaatctgcatactataaatatacagtaagacacattttcacaagctgaacacagtcctataccccccacccaatgacctcttcattttcttccccagtcgttacccctccaactaccatggataaccactatcttgacttttaacaaaataaatgggttttatctctttggtactttatataatttggaaaattctgtactcttttatgcctaacttatttcactcagaaatatgtttgtgagattcacccatactaattctggtagatgtagattattcattctcatagctgtgtagtatcactttgagtgaatatatcacagtctgttgaaagacatttaggtcatttctaacattcgtccattactaacaatgctactataaaacattttaaaatagcatagtgcaatagaacttcctacaatgacagaaatattcttaatatgtaccaccaaatatggtggcttttagctgcatgtggcttttgacctctggaaatgtgtggctagtgtggctgaggaaataaacttttaatttcagctaatttttattaagtagtcatatatggttagtggctactatattagacagtacagttctagcacatgtctttaggtgaacacatgtgcttatttgagaatagttattttacatgtaggaatgaaatgaaactgttgggaattgttattttatacctaggaatgaaattgcttggtcataaggtatgcaaatatacctctaatagattttaccagaaagttttctaccagaggggtttagtcatgcttatctttattcccttcagcaacacatgagagttccagtttctccacattcttgataatacttgacattttctatttaaaaaggaaatttagccattaatggctttactttttaggtgcctccataatctccccacatccattcttggttacatttaaactagttgctatggtcttaatgtttatgtccccccacccccaccccaccccacgccaaattcatgtgttgaaatcctaacctccaaggtaatggtattaagatgcagtgcctttggaaggtgaattggacatgagggtggagcatgcatgaatgggattaatgtccttatgaaagagttctgagggagcttatttgcctttcccccatgtgatgaccctgtgagatggtgccatctgtgagaaagtgggcctcatcagacactgaatctgctactgcctccatcttggacttcctagcctcaataaccacaataaataaatttctgttgtttataagccacccagcttattgttatagcagccaaaatggactaagacaatagtcttcacaaaagagtcacatcttttaaaaaatacaaatcagatcacaactcctttgtgtaaatctgttctcaacttcccattgtttttcctataaaatccagatcctaatcaaggtgagttatgttcaccaattttttctttattataaccacttcacagcaattgcagcattagaaattttatctctgatggaagttaatatcaacacatctactgatggtgagggttatatgtgtacaaacttggaaattagtttccagttgtaaacctatataacaaattccaatgaaatctagctcagaaaccatacaagaaaaaagcacactaatttaaaaaaggtaatgctttatttgttttcataaatatagctactgattgctagtgaaccaagaaactaaaaatttacatcaaataatgtatgattatttttatacagagcatttttttatcatcacttgggtttttctgaaattcaattattaatcttttattcaattggaagatagtaaatgaggacattattcattgccccaaagtcttcaaactgttcttaaaattagggtaaactatatcatcattctttttttttttttttgacagtttcgctattgttgcccaggctggagtgcagtggtgtgatctcagctcactgtaacctctacctcgcagcttcaagcaattctcctgcctcagcctcccaagtagctgggattacatgcacccaccaccacacctggctaattttttgtatttttagtagagacagggtttcaccatgttggccagaccggtcttgaactcctgacctcaggttatccacctgcctcatcctcccaatgtgctgggattacaggtgtgagccactgtgcccagcagttattcattttttatgtgttgtacatgagagatactaactggttaatattgttcagctgtttccccacccaaatctcatcttgaattttagctcccctaatccccatgtgttgtgggagggacctggtgagaggtaattgaattatgggggtgggttttcccatgctattcttgtgatagtgaataagtctcactagatctgatggttttataatggggagttcccctgcacgggctctcttgcctgccgccatgtaagacatgactttgcttctcctttgccatctgccatgcttgtgagagacttccccagccatgtggaactgtgagtcaattaaacctctttcctttataaattacccagtcttgggtatgtctttattagcagtgtgagaacagactaatacactggttaagaaattgcttccccaaaattcaaatcccagctctgccactcatttgcaagacctaggtcatttacttagctattctaagattaggcactaatgttaactaattattaatgatattaataatcaaatctatttcaaggaattctgagaataaataagaaagtgtttagaaagcactacgtcttctacatgtagtaaacatccagtgtttctttttatgttattttgcattttcttattcttatacttgtcatgataataaatgattcctttgaaagcttttgaaagataaatgctctttttccattttggtatgagtcgatagggtcattaagtctccaagtggcttgtcagtgttatatactgatggcatgtatatcaatgattagatggctatgaaaatgaattttagttttagttattactatagatattttaatttgcattaataacattacttaaaatgctgcttgcaacttatgcctttataagctgtgagtctcctatagcaattgttcactataaaatctcatgcttcctcccatgcagactttacacactgtattttttatcagaaatatccttttttatgtatttctacaagatgaaattcagtatatccttcagtgccacattaattatgcctcttccatgaagacttctcttcttatcgccatctattaggatctctccctaatttaacgtataactcttgtgttatttttaccttttgactgtatattctggttagctactgtattagtcttctattggtgtaacaaactaccacaaactgggtggcttaaaacaacataatcttaatatctgacaattccttaggttaaaagcctgaaatggctctcacagggctgtcaccagggctgcattcttttctggatgctccaggagataatctaattacttaactttttcagtttcttgaaatcacctacatttcttagatcatagccctggatcaatatttctccttggatcacctccatgttgcccattttggtggcttacttatattttaatgcttatttgagtgtgcaatcctttcacttttctaaaatttatttttctctactatacaatagaaatagtcacaagaattagaagttagtggggaaaaattgtaaatgataaaatgatgacaagacacatttctagagtaccaagatgggtcacacacacacatctttaccaagttgtttggttgtacaagccttgaaagaggggcaaagggggaactgagtgatttaagaatcacagaatttggaattagaatagacctccagtatagctacctacattccagcaagttaactattgtgtttatttatgagaggttaagtgcctgatctgagatgatacctctgctatatggtcatgggggctagaacctagctatcctttttgaattgctaaagaaccctccatacagtaacagatttcagaagcccctgtacttcccctagaagacacttatggatgcattctaatttgagctgccatcagttaggtttagcagaaataattttcagcaaagacaacaaataggttaatgaaatttttgaatgcaatggttctttcagggccatatgaatgtgaggatggtgatccctgtgtcaatggtcaatcgctttcttgtgaaaattatcgccttgttttccctcatatctatattactttgaagaaatatcctggcattataaaagtttttgatctccaggattttttcattttatctaatctttctcctttgtttcacaaagaagattaaccagttattcatatctcctgactcgtttgttgctaactgaaccagggctgaaactctgaattctgacttacaatcagagactgtccctcaattccatgttgtgttacctctattagagtaacctgagtaagcttcttagaaccagaaacacaggtaatacattatttaaatatcacactgcctcttgcatgtagcaggaacaagtaagttacctaagaaaaacaatgaatgaatccaaacagcctattgacaaggtaatccatagaactgagagtcagcaagatggcaggctacataaaacagaccaaaaagatgatagaaatgaaataataagattgtgtctctgttaaatttgtggatcacagtaaatgcttcactaatggtaacctcatagcatccagacacagtgagtcatttctctggttcccccttgtttttacccttgatttctcaagagtagctcagttcatatatttttgcttcagtaagaccattgactttgtgtgtgtgtatatgtttgtgtgtgtgtatgtgtgtgtgtgtgagagagagagagagacagagagaatggaggaacagcatagcacagaactgttcagctaccaacctaaatctattagccgtgctgtcctggaaatcacttttcagccacacaaaatttcactggccctatatcccaaggagccctgagttgccactataccgtagactcctctctccgtctggtggctctttccttccccttttttagatatataccttcaacttgaacctttttgttagtattatattattctttattttgttttaacataaaggggccactggacaatatttgttcagatcacttatgtgtactgctcagttgatatgcacatttactcttctgaaactgtttagcattaagtaacttagaacataaaaaacaatgcaacaagcatattatcttctattttttcccaaatcctttgtgatgtaagaggacagaacacatatatacatatcttttctacaaatggattatcaacattgttctcaacattacctagttccttaaataagaaatatatattttaaaatttgtatggcattcaaagagttacaattatgaatttcacatttctctagatgggtattaaacaatctttggcagatcacagactaagaaaggtaacagatgttggattggaaactgtacagtctagagatggaaaattaatttgtaaaaaagtagtgatttttttttccactgtgtgtgttttaaatggccttagcaaagcagaatggaaatatttgcattcctggcaatcaatttgcatacttaagcatttgtttttgttcccattctaaagataactgtgtgttcagtaataacccatatagtagaaagaagggtgaagaaatgtgtgtctttggcatccagcctgctgttagcgagtgactttctttctttctttctttctttctttctttctttctttctttctttctttctttctttctttctttcttttgttttgttttttgagacagagtctcactctgtcacccaggctggagtataatggcacgatcttggctcactgcaacctctgcctcccaggttcaagcgattctcctgcctttgcctcccgagtagctgagactacaggggcatgccaccatgcccagctaatttttgtaattttagtagagacagggtttcgccatattggtcaggctggtcttgaactcatgacctcaggtaatccacccgccttggcctccccaagtgctgggattacaggcgtgagccaccgcacccagcaacaagtgagtttcttagtctacaatgttcacttggaatttctttactcatgtcttgatgtaaaactcgctgaacatactgctattataaaaatagatatattttccatctctctggtggcatttcttctcttcctctcacctaacttaaatcttctatttcgcttctccagagctcccaacacaacagtcttcttttatcttcaatacgtagtggaatattgtgaaatagctgaagcagaatgggggaggagacagtggggaattttttaaaaaactgttttacccaaccattgagcatatactttttaaaatatttatattctgcctagagttgatgctgatgaaaccttgagtctgacaaagattttataaaaattcctatcacattccctatttcaatgtcaggcaataagtcagaatgcaggtatgacaatgtttttcaatggtcttacagcagactagaaagcaccatcaagaggagaatgcctctgctaagaggaattatctatttacactgcattgcagtcccatttctcatgcatagatctgtagcatatttggctaaaacttgcagaattattatgtcgcttcctgtccctctatccctactcactactttgttcaagggaattaataaaaaaaaaaattgccttattttggagctgtttgcgaaagtcttgttatttcagttaaagagaacactattttgttagcaagccattctgtttctttgggctacatttctatatacttatcagctaattatatagtgcagatatttttagtgggaggtagtcttttttttttgtccacttgtgacttctgccttgagacatttttgataaaattgtgctggggtcaagttgaaaaggaatgttttcctacattaaaaattttaattttaaagcaatttgactaaacatatcggtgatcataaaaataaagtcaaggtttaattcaaaacagaacattttagtttgtgtatagaaaaactttattttggagcagatatcaaggagacaaccaacagaataccgtcttcaactcttcgtttgttcacaaataaactcaatagattaaaacttatggtagtgaagttgcagggcaggctgttaccagcacggtaaaacaaaagaaagaaatctcaaaatacgtgcccttttgattgtggttatgcataaagctttgacagagtaaaatacatagaatgggtgtgtatgtaatatagagatacaggcctggaaagctgcctagagactttccgttgatgataattttagtacttaactaaaaaccatggttttttgactctttcatttttatttctgtaaatttaacttctactcagacagtagaagttttattctcttttattttattctggtgaatgcatcaaatacaaaagcaagttgtttagctcacaaattgcaattcagatcctttgccccttgtgcattcatttccagtgatgtttttaacaccatttgatcttaaacacccaacagaaaatagaagcacagggtgctacactgttacctcaatgagtgtggacaagtaagaattaaagtgaccttagattccagatttctgtgtccttccttaaagaagggatatacagaggtgctaagttgatttatactaagttaaagccatttcagtaatgcaatgaccttgtaccaataaatgtttaagtatctagttcttcagggatctgagaaataaatatcatatttaaaataacagatcttctttgagaacttttgactgcctgaaactttactcagggtggattttaaacaactttcatatacataggaatgaaagtatggctactatatgctttttactttaactcttattacaggttgaatagtgccaaagatgaatgagtatatttgtttgctcataatatgccaatcgaattctccttttgaggactgagtagaagttaagagtgtgagttacagccctgcttttctttttaaagttaccttggtcattgtcccacatggtggggcccatttacctctcagtgttcttggctacaaaataaaaatgaaggaaaaaataatgtgtgaagcatttttgagctctaaaaattctgaatttatgtctcaaaaataatactaaatgacccataattcaagataaatgtacacagtaagaatttttaatataaggaaatgtaaaacccaagaaaaggagaataaaataattatatgaaaactcaaccatatagttactgtaattaattattataaatcactcgatacttgctgacatggaagttaaaacaaatatttcaaaattcatcaaatacttttaccaaagaaaagcagaaatgtttggcaaatctgttataggagttttcttcataattttatgtaaggacctggtttaccaaaagctgttagattgatttttcctcttgtttttctaagattttaagttctataggatttgttaatagtgttaacacattttttattcaccctcaatttctgagggtagacatttaccttaaataaaaaaaaataacatgggagaattgatataataagatacagtttttatataagataaaggttatctcaaatcagctttggtgtgtgatcatcataagcttagtagggcttaaatgacttgttccattgtagtactgtcctcttttcctttatttctctctacactattcctttgtgttttaaaaaattattgaacctgctgtaaaatagaaatagtaacaaaatatacatcacaagatgtttgtaaagatttaatgagataatgcacataatgtatttaatacttttactagacaaatgttcttaaaaatgcaatcagtacatttatactgaaagaaagacacatacaaagagagaggtggaaggagaaaggacttgtggtccctttttgtttgatggaaactctttctcttataccaaactgatgtctaggcaataaatctataaagcactaataattagagcaagatgctggaacagaaacatactaccataatatcccacaaaagcactgattttgataagtaccaatggatgagagtacctttgtgggagcctgggcatctagcagaaaagtcccagtacactgttggagcaaaaggtatccaaggatagacgtattgaagggaataagaacggtttcactttacccatgtcacccctttaccgggcatagctcagtgacaagagaggctccctcagcctgcaatttttcccatacgtaaaaacaagcaagtagttagtaagtgtccagttcccctagctgtatgggatgctgcccaagacatccacttctttctaaccccacccaggatactgaggtaattagcatgactgagtggttggaagaaactgggaacaggaaacggaggctatagaccctactaaccactctacagactccctgaggaagtccacccatgaactacttaggaggccttgcctgtggatcctcctcaactagctcatgggcaccacaagtgtgccatgcacctcaagccccctccaagccagctcccttaatataccactatggacagcaagagcaagtgtctcactcagacaccaagcatgactctgcaagattgagagaaggcatatgaacttgagcatttctgggcacggccacagagaacacaaatgggaggttctcagaacctgtcctggctttgtgggatcgagagacagcatacagtcttaagaattcctccctaagagggaacaagtggcatggagcagatgtatccatggaaaatgtctaagagtactagctgaatctaagagagctcagaatctctggctgggttgattggtgaaggattaaaactgaaggagataactgcttcttcaaatgagaatacagtaatgtaagacttcaaagaacattaaataatcaagaaatatgataccatcaaaggagtacaataatattccaataatgagcctatcaaaaaaattaagatctataaattgcctggcaaattgccttcaaaagaattgttttaagggaacaattcattaagtgaattgaatgtgctacaagaaaacacagaaaagcaactaaatgatatcagaaaaaaatacacgagcaaaataaaaagttcaataaagatttagaaattatgagcgaaaccaacagaaattctggagctgaagaatgcatgaataaaatgaaaattgcaatagagtgtcatcagctgccttcatcaaacagaaatgatctgtgaacttgaagatatatcatttgaaaatattccatcagagataaaaaagaaaaaaacagtgaaaacaaatgaacaaaacctacaacatttatggaacaatatcaagaaagcaaacggtcactgtatgggagctccagaagaagagacagaaaaggaacagaattcttatttaaagaaataatggctgaaatatttccaaatctggcgagagatgtgaacatccaggtatatgaagatcaaaagcctccaaacggacttccccaaagaagactcactacgacacattaaaatcaaattgtcaaaaatcaaagacaaagagaattttgaaagcgccaagaaaaaaaacatgcttatcacatataagagaacctgcattagactatcagacaagaaataggtttttgtcagcaaaaaccttgcaggccagcacagggtagaatgatgtagtcaaagtgctggaaaaaaattacaaaacaaaaatagattacctggcaaagctgtccttcagaaatcgagagataaagactttcccagacaagaataaataaataaataaaagttgaggaagttcaccaccattatacttgccttacaagaaatggtaaagggagttctgcaagctgaaagcatgttaattagtaacatgaaaacaaacaaaagtataaaactcaccagtaaaagtaaatatataagcaaattcataatactctaatattgtaatggtagtgtgttaattacttatgactctagtataaaggttaaagaacaaaagtatttaaaataactatagctataataacctgttaatagatgaacaatataaaatgatgtaagtcgtaacaataaaaacttaaaatggggtgggcagcagtgtaaaatttgtgtatgcaattgtaacaataaaaacttagaattgggtgggcagcagtgtaaaatttgtgtgtgcgattaaagtaatacacgtaaaatagattgttataactaaaggatgtactatgtaagcctaaaggtaatcatgaagcaaactcttatagtagatacacaaaaaataaagagaaataaatcaaagcgtaccactatagaaaagcatcagttcacaaaggaagatagcaagaaagaagaaagaatcaaaggatctacaaaacggacagaaaacaattgacaaaagggcaatagtaagtctttacctattcataatttgtttaaaggtaactgaattaaaatttccaatcaaaatatacacagagtggccaaatggattaaaacaagatgcaactaaatactactgtccaaaaactcacttcagctttaaggaaattcgtagactgaaagtacaggggtggaaaaagatagtccatgcaagctgaaaccaaaaagagcaggagtagttatatttctatcagacaaaatggacttttaagtaaaaactggaaaaaagaaacaataaaggtcactgtataatggtaaagtagtcaattcatcaagaggacataacaattgtaaatttatatgcacccactattaaagcacctaaatgtattaagcaaatattaacagagctaaatgcagaaatagagagcaatgcaataatagtagggaacttcaatacccaactctcaataacgaatagatcgtccagacggaaatcaataagaaaacattggactttaactacattttagaacaaatgaacctagcagacatacaaaagactccatccaaaagcaactgaatgcatattcttctcaagcatacacaaagcattctcctgaatagatcatatgttaatccacaaaacaattgttaagttttaaaagattgtaatcatattaagcatatttctgacccacagtagtataaaactagagatcaataacaggaagtatactggaaaatttacaaatatgtgaaaattaaacaacacatttctgaaaaaccaatgggtcaaaaaaattaaaagataattaaaaaaatattgagccaaaagaaaatggaaacacaacatacaaaaacacatgggatgcagcaaaatcatttctaagggaaaagtttagagtgataaattcctatgtgaaaaacaaagagacatctcaaataaacaacctaactttacatttcaatgaactagaaacataacaaactaagcccaaatttagcaaaaggaaggagataataaagatcaaggaagaaataaaatttgagaagaggaaaccaatagaaaagatccacaaaactaagaattacttttttttaaaaaaaggtaaacaaaattggcaaaccttcactacactaaggaaaaaaatacagatttaaataaatatgatcagaaataaaagaggagaaattagaacagacaccacaaaaataaaagtatcataagaggctaatataaacaattatatggcaacaaattagactgcctagaatagaaaaattcctagaaacaaacaacctacaaagtctgaatcatgatgaaacagaaaatctgaatagaccaataacaattacagagattcaatcattaatgtaaaatctctcataaaagaaaaacctatgacctaatggcttcactggtgaattatatcaaacatttcaagaataattaatagctattattttcaaactctttcaaaaaattaaagaggatgatgtatgtccaaactcattttactaggctggcattactctaataaagccagacaaggacaccatgagaacagaaaatttcaggtcaatatctctgataaacatagatgtaaaactcttcaacaaaatactagtgaaccaaatttaacagcacattaaatggatcatacactatgatcaagtggtatgtatcactggggtgcaagccaaacacagaagaacatataccgcagcacctcacttaaacatggaatctagaaaagttgaactcatagaaacagagcacagaaggatcgttaccaggggtatagaaatggggaaaatgggtagatgttgatcaaagggaacaaacttgttagtataagattaataagttctggagactttatgtacatacggtgactatagttgataataatatattggatacttgaaatttgctgagaatgtagatttttcatatccttacaacacacacaataaaatgtaactatgtgagagatatgcatgttaattagcttgactgtggtaaccatttcactatatatatatatatatatatctgaaaacatcacattgtacaccttaaatatatacaatttttacttgttaattatgcctcagtaaagctggggtggggagaaaacctctaatgtttaacttaagtacaggacaaaaaactagcctatacattttggtctggacaatttgcccatctttgtcctctcatgacctccagatggtgaccttactattcagtggatgcagaagcaagatagatgacctttcaagtttagtctttgccataatgcctaacccagtctaaatggtgctgcactcaaatgatagttttgataacagtgttacatggggtcaatcatcatttttgcaaacgacttgagtaattttttttcttgatacttaaatgatagttccaacacaggtgattctcctccaaaaccataatgagtatgagtctgttgaataaatgtatacctatactttagtgagcatagaataatatttttaaactctttatattgttgtttattactatttcttaaaaccttatacgtagtctagttttactgtggattattttccttgtgtcctgggattgatatttaatttctttgcttttcttcacactttagttataattgttatacatttagaacatttaatctggatttttgtaccattcagtaaaagtagtcaaacttcccaaactttagccctgttttctccttacccataagctaggaatcaatatcagaatcagagataaaagtttgtaccccctccccgtctgtattgagctgctcatgcatttaaataattccattaattaatggtaacagtaactttggacataaagatcaaattagcagatatatataatgaacatatatatataatgaacatatatatatatatatatatatatatatatatatatatatatatgcttattagcttaactgtgaaccctgatgaggaatgtggtatgatttgttgattttatgccttaatgatcatgtgttctggctgcctgagtcattttcttttaaatgatgtatttgtgcattccttcatacttccagagttcttctaagttataaacacagaaaaatgctacagagccctggtactgcattccacatgtttccttatgatgtgtgaaaggtgtcgaattgtcattttctaagcttatgttacagagtaggtttttggtagctgtaagtctaattattccttctgaatatttaaatactgaaataggccacttaaaaaaaaataagactggggaggtgtggtgggtcatgcctgtaatcccactactttgggaggccaaaatgggaggatcactgggaggactgttgaacctgagttcacaaccagcctgggcaacatagtgagacctcatctctacaaaaaaaaaaaaaaaaaaagccagctgtgatggtgtgcacctgaaatcccacctactgaggaggccagggtgggagaattacttgagcttgagaggtggaggctgcagtgagacatgagtgtgccattgtactctagcctgggtgatagagtgagaccctgtccaaaaataaataaaataaataaataaaaccaatactttctactacaaatatattcattattcattcataacgctttgattatgatgagaacacttgtcttaagtgacaatatgttcttcaatgttatgttaatttcggcccacctgaataggatatttcaaagaaaagtattaaaatggaaaatcttaagtctaattgataataataagaaacatattaccttgtgaacgtcccactttgtcacagtgttttgatttattttatgccataagaccatctgagacatttgtcgcacatttaacgctggagggttttaagtgatggatatttgctaagtctgatttagtcaattatttacttcaaactggcaatttattaatctttcttttatgcagcaataacatttatttactggaaaaactgaatgcaaatagtgtatgtgtccattagtatcaagtttatatttctattgtcaactggaatatttttgtttagtatgacaatctggaaaacaggttgataaattctgtgagattgggtcaccgttaggtagctctcacaatatagatatgatcaaagatgagtatttgaaattcactagtttatgttaatgaacattcttatagaggctgccagggggacagcttctattggaattaccttttgtgaatcctcctcattacggggtaagttcttactaaagtgaataattatctttcattccagaactacagtgtcaggcataatgagtggattgttaatacatttttcaaggtagcgccagtcttcatctgtagccattaatttggtgacagccaataattattttaactggcccctgatgctgaaatgcacagattgttttcttcctgtgtggtgcagggaacacttctaaatttctgagaggtttctgtcacttcccaaagaatttcctgacagcagtgacatttggtctaatcatttattccctcagtttcatgacttccctgcggtggctctcatagtcaggaaagcttctgttgttttggaaccacagctacaaacatctgctgccaatattttgcttaaagtgttgcaactttccttaaaaaaggagacccccttctttttatgcttttagttattttccttaaaataatgttaaactcttaagaagtttcatagaggtggacatctaaaattattaatgaggaagcttttaaagatagaactggaatttgattatcaatagtcctcaggaaaaaaagagaaaataataataaaataataattagaataatattgaaatgtttataaaatgttatctaaaaaataataaaaatgaactcatttttactttataaatgactcagttataataaaaactactcagaacaaacacaccaaaatgataatagtcattggtctcagcagtagagatacagatttcttctttgtgttctgtactttgcaaatattataaaatagttattacttagaaaaaattgtttgaaatgctaaaataatggacatctactaaacacgaaatacaaaaaaattgccaaaacataatatcttcaaagattttcaatatataatcttactataaaaattttatctataacatttataccagttacctatcactattgaatatactttgaagattatgcaggaatatttcttaattctctatagtttccatttgtctgagggttttttccttattcctatccttctccctttctctttctcctctatatctgcacttttaatatgaaactgtaaggaaaagaaaattagattggagatctctatggggcaacagcatatcggctgagttcagcatttcaaatttttgttctcaggtctcctttacactcttatgattatcaagaacaccaaaaactttttgtttatgttggttatacacatcaacatttgtcatattagaaatttaaaatgacaattaaaagttacattaaaaatgtacttaaaagacaataaaagcattgaaaatcaattaaaacaacattttattaaaaacaaccatattttctaaacaaatgaaagtatttgtgagaagggtgggcttattttacatttttgaagatttctttaatgtttgacataataaaacacggctaaattttcttaaatccttctgcatttcctatatcacatatcatgtagactctaaaagaacttcattctacctgttaagaatgaggatttttgaaagagtaaaagaagaccaataacatcttagtagttttatggaaaaattttgactttgtgaaccactcgaaatggtctcagagatacctgaaggtcctcagaccacactttgagaactgctggcatatgatagatatattttatttttgtacctagacagcattccattttaatgaatgtaccatatttatataaactgctctgcaaatgaatgaatatttgtattgctttcaggttttttttctattacaatgttgcaatgaatgtccctataaaatatatttgctcccatgcatggatttatgtatatgatggacacttaagagtgaagtccagggttaaaagttatgcatattttaaagtatgatgtattgacctcctaagaaaaagattctgtaaatgtttaatttcaccaaaacaatacaaactcttgtttcctagctcttcaaaatactaggaaagtataaatttatatgctctgccaaggtaaaagttagacagtgtcatgatattgttttatgattttcctctttactaatgagtttgatcatttttcattcatgtattgttcaattatatctctttcatcatttacctgtggttccagtttttttattatttttctcttgggttgtgtatttttatgtattgacctgttgacactctgtatattaaccaaattagccctcgatttgttgtgtgcctcacaaatttttttcttaatcagtacatttaatattttcagtagaccattctcaatataatgacttggaatgttagtaatgtacacatttcatagactatgcctcttttctacgttttttattatttcaggaatagtaaaattagaggaattgaataaacaaaactattttaaaacttgtcaattaagtttgttcagaatacgatttgtttcccagtattaactctggacatccagatatagacaggctataagcttctgattacatgaccagtgtagctagtttagattcaccttcacagagtatgtctaccatgtactgcaccttatttgatataatttaatagctcaataggtattagctgaatgaatgaataacaataattagtagtgacattaattaaacactccttttctccacctctgtttactggaaataatgcttttagatatagagatcttttgagactattctgtggtttcaaaaagctcatcaggaaatgatgttttctataattggagtaatctatcaaaatagatgaattctaaaattataataattcctgaaattgtcctgaggcaaaatttgttctactttcataagtgtttccattttcttgttaggaagaagagacacaatctgaaaaccaagtctaattttcccataggtgtaaaagagaagaccttagtaattacttgtctttttcatccagccacttagtgtcttttcttatttttgctaatgactgcaaaaaatgaagatctccacaaggagaaaatgttctccccttagaatggctgttcttagacttgagttacacttttaccatcatctaatttttgcaatattttacatctttgcccagtaaaatgaggttcctaagttaaaagatttttgagcatattattttgaagttgctgttttcagtgcaccattcacattattgtcattattaattgcattctgggaccaaatctattttgaaaaatgtttttcttgcatcttggataaactgaataagcaaagaaagctactcctgaaacttgtcattaaagttttctttagaatacaattcattcatcagtactaactgtgagcatccagatatagacaggacataaacatttgaatatgtggccatgtaactaatttgagctcacctttttagagtgtttctaccgcacacaagaccttatatgaaacgatttaatggctcaataaacgtttattgaatgaatgaataacagtaattactattattattatctacaacaatacttgcaagtcttctgtctttttgccttttctttcatttctttttccccagtgataggctagataattgcatcccagagatgtccatgtcgtaatctccagaacgtgtgaatatcttgccttacttaggaggtgtgattaagttaagaatctttagatgggaagattaccctgattctttcagatgaaccaagtgtaattgttaggatcgttataagagggaaacaagaagatcagagttagcagtagatgtgatgatgaaaagagagattatagtgatgtgaggaaggggctgcaagccaatgaatgtaacagcttctagaacctgaaaaggcaaggaagtatatgcttgcctaaagcctccagaaggaacagggccctactgatattttaatttcagaattctgacctccacaaaagtaagagaatagatttgtattgctttaagccactgagtttgtagaaatttgttacaacagccataggaaactaatatacttcttttactccaatttctttctgtattccatgccattagatattgcctccagaatcaagcatctatgatagtgcttagcacttaaattggatgatacatttaagttcaacccttgtgtcatagtggattggattttactctttataaaatgtatattgtgaacttctattaactcaaggtcttttctgtttttgtcacgagaacgtaaatacattcaaatgaaaatatgctgcatatttttagaagacaaattttccttgaacttgatccttatagaacttaactctgtttactggaaagtaatattagagtttaaaatctagagatagcggatcatatagataagcaatgcaggatttcagtgatttctatggtcaccagtacaggtgtgatcttaaaacatcgacactattgaactgaattcataggtatgtatttagcttgcatttgtttattccagtagccactgaggtgtatttctttgtttataatctataatcaaaatcctttgctatgacatacaaaaaatgtatcgagccacggacgttgaccagggttttcttccttcattagttgaaaatgaactgtatctgctattgtttatctggggaataaagagccaaatgttaaaagttgccttcagctaggagcagtgcctcacacctgtaatcccaacactttgggaggccaggaggggtagatagcttgagcccaggggaccagcctgggcaacatagcaaaaccccatctctactaaaaatacaaaaattagccaggcattgtgatatgcatctgtagtaccagctacccgggaggctgaggcacaagaatcacttgaaccgggaagcgggcagaggttgcagtgagccgagattgctccactgcactccagcctgggagacagaatgagactctttctcaaagaaaaaaaaaaaaaggttgctttcagttagtctgttcacagtataattttacatctgggggataagaaaaactgttgactgaaacattttctacattttttctttggttcatattaaaatatgtagttttacattatttgcttttggtagaagttctgtctctatcaagaagagtggaagagtgcaaatagatgtacaaattccttggttatataaatattattctaattgtaaaataactgaacatttttactgaggtgtgctgagaaagctctttgtttttttgttgtgttttgttttgttttgttttgtttgtgcctataatctgttcccatggggacctgcacaatccatgattctgataaaatgaagagcagtggagagttacaacttataaagcagttatgactaggctagtcaataaagtctcaaaatcagctattagagtacggtatttaaggtttgttagagaacacagagtatggaaacattgccattaactaatgtgtaatttggtcacatttcctgataagataataagactttttgctttcctctaatctaaactttctccaggaagttatgcaacataaagcactatgattaatattgccactgaataatgtaaatgtattttctcaaaagaaatgaatcccattaatgggactgaacacagtcttcagtggaaggttcagatttttgattcaaacaatccagcatttccatccatttactaattatatgatttgagtaagttatttcaaatcactaagacttatttatataatccatgaaatgcaagtaatactgtacctttactgaagaagttaaggaattaaatgaggtattgtatctgcattagtctaaataagatagatcatattgtggtaataagtaattcttcaaatcttagtggcttaacacttaaaaagtgtcattctttgttcatattagaaagttaagatgttgttggctctgctgcacagttattcagaatcttgtgaaaaggagaccacaccatctatagaaattgcagcctctgaggacatgatagcaggagatcagagatgaaaggagaacaccagccttcaaggcttagctcagaagtaacacttgtcacatttggtagtttataggccatggaggctcatgtttataaggaaagactgggaacatggatattggtaagcacagtccttcctacaacatctaaaatgcttagcaagatgcctggctcataaaatacctcagtaaatgttgtctttttcaccatcgctattattattttagagggagtgcaagttggtagttaagagtctgccactaactccatgactttaggcaaacttttaaaactttctgaatctccattgtaaaaataggtctcccctcataagactgttatagtgaccaaatgaaataaagtgctgccatttagtaagccctctaaaaatatggtagtttcattgctatcatgcatttatattcattttatctatcaattggttaaacccaattaaatgcctacatatgtgtgtttttattataacagtgttgagatttcctcatttttattaatatgtataaactaataaaacattgattttcctatttgtgacaaatatattacaattattaatcattcatttgataggtatttattaggtgtctactgttttctagaggtaacagataaacaatggacaaaatacatgaggttttgctctcataatatttgaattctggagcagtgaagagtaaatgaggcaaaaatcaacaacataaaaataaactgtaatttcaggttcgaataattcctatgaatttattttaaaaaggaggatttggttaagactgactggttaagacttacattttgatagtcagaaatgccttttctgaagaagcagtgtttcagctgagatatgaatgatgtaaagatatttgagaggaaagatttcctttctggcagagggaattccaagtgcaaaggttccaaagcaagaacactgtaactagttcaaatgtaattaaagcaaaagtgagcaacagtcaagagttgttagaaatgagactgtaaagataagtagtgacctttttgtctatgaaaaaaagtttgatttttttttttcgatatttgatgtggaactattcaaggttttcaaacaggaaagggatgtgatctgatttttgctttgaaagatcattctgactatgtatggaagaatgatctttataaagaatggttcctttataaaagggaccattgcagaattccaaaaagagatggtggtaattttgaatgaattatttggtggggggatatggatagaagtggaagatttgggatatattttgaaggtagagttaatatattttgaataaggtaggtaagagtttagagctgaaagaggactagatttagggcttcagccactgggtggatggtactgtgatgaaggctggggaaagaatgggctctttatgggatatcaagagacatactttgcatctgttatttccagatacctcttaaacatttaactgactgtcagtcacatgcaaatcttttggcctttcaaataatacaataattttagtttagattatgcctatttttgaatgactgcttgttatgaatgctattcagcgatgtgatgactcaatatattttcttttaggtgctctgctgcaagaaagtttaaagcatcttagtttagaagctcataaatactctctaaaaaaatgtgatagaatttacaaagataagcttataaatctaggaagatacattttacttcagagtcaaaaacaaaacaaaaaaatttcattgacaattcatccaacgcccaaatgaattgattagccaagaacaaagaggaatttttactaataataggtttgtatagcttccttgttttaaaaagaactatgttgtgggtttttttcttcccctaatgaaataaaatattagagtgaaatttttaattagttaagtagtttgttgcattctaccacatccatgaccatctgatatagtacccaggaagaagtcaaagatgcaaggcgccatatcgcatgatacacgataacaaggtaatgaagagtaaatacatttgtcatttcagggaagttatttacatgacacagccttgggaaagcctgcttgggagacataaatgaatgaagctttttagattgatgaattaagtgtgccttttttgttttcaataatgtccaataaaatagtttatattgagcaagaggtcttcttttctgatctaagacataatgttgtacaagaggtacattgtgtggatacttaatatgatgcacatttgtttacatataacttctgcaaggagatattaactcccaagttctggaatctttctttgtgcttactagttatgactttgtaacccagggtcagagttccaatttcagcacacaaagcccttgcctttggcagctaaaggcctgttattatgggcaaagattaaaattaccctaggccaagatctataattttctatattaagtcttgagtcagtgccacaatgcaagtaaagtgaagtatcaataactcatttaaaattatttttctcatgaagcaggcagactagtcattctgttaaatccagtaaagggcataagggataaatctgggccactccaattttgtgttttatttttttttttttattttttatttttttgagacggagtctccctctgtcgcccaggctggagtgcagtggcgcgatctcggctcactgcaggctccgccttccgggttcacgccattctcctgcctcagcctcccaagtagctgggactacaggcgctcgccgtcacgcccggctaattttcttgtgtttttagtagagacggggtgtcaccgtgttaaccaggatagtctccatctcctgacctcgtgatccgcccgcctcggccttccaaagtgctgggattacaggcgtcaattttgtgttttaaatgaaacactgtgaacctatacaaggggatgtggtctttcccctttgtattttgtgtagggctggaacactcattctcaatacaaaatagagccaactctttgttcaccttttttctaggtatccccctaagtctctgaatgaaggaattgattgttgtattgtttctcagtttctgttggacatttaaagagagagggtagcagtgctcacagaagttcttcccttcaaaggcagcctatgtgaggtttcacacagcagtcagccagcgcacctggacagtcaggcatagatgcatttacaggatctttctccaatctgccataagtcatttttcttcctatgcctgtgctgtatgaactatgccatttagcggccacgtgctcccttactcctttataattcacatttagcgtcaatccagaggtctctattttgtcttttctttcacttgaagcttatgtatatagttatgatatgctttacattttgtccagggataactatagtttctagggcaactataaaacttggggaatccaacaaaaaagtccagggggttaaacaataatctaagccttttatttgtaaatctttgcatatctgtgaattgctttaaaatgcttcagccaaaaagggcagggatgctgaatcagacaatatggacaaaccatgaatgcctatggaaactacatggtgagaatatggagattcattatactattccctctgcatctgtgtgtttgaaaatttccatatagagaaattatttttaaaaaataaatatgtgaaagcaaccatccagggatgattgagcaggttttttgtttgtttttaaacagacttgtaagaggttttttttgttgttattaataagttaggctcaaaaacatatggggacaaactaaaacctacataaagagaaaaagaaaacaatgctaccatttttggacattgctcaatttcacattgtgaatgctagaatttgctccttgaagtgcaattggaatcattttctagatcttttgtaaaatcacaaaggatatttttgtgtttattaatatctttgcagccccttagagaccttgacatttttttctttaatactactaaaataatatcagatatacactcaggtctattccatttttgaatattgtctttcacacatacttatgcacatacaaatacaccactcctccccctccaccaaaggaatgtgtgtgtgtgtgtgtgtgtgtgtgtgtgtgtgtgtgtatttcacatataaaagcaggccaatgttgagcgtagtggctcccacctgtaatcccaggactttaggaggcccaggcgggtggatcataaggtcaggagttcaagaccagcctggccaaaatggtgaaaccccatctctactaaaaatataaaaattaaccgggcacagtggcaggtgcctttaatcccagctgcttgagaggctaaggcaggagaattgcttgaacttgggaggcggaggttgcagtgagccgagatcacaccactgcactccagcctgggtgacagagtgagactctgtctcaacttaaaaaagaaaaaaaaaaaaaaagcaggccaactaaaggtttgtttttgtcaactgtagtatttgggttaatcaggtaatgctgcacattctctttcaaatttagatttttatatggtaacttgtttgatatagttatcaaacaaatggggaaggtccaataatgttaaaagaacaaaatcaacaaacatcagtgaagaacttgatttgcagaaatattttaacagcaagaagcattctacagttcatttccattttgatggccattttaataacaatgctgaatgagaatgcatctcacctatgtaacagaaaatttccttgattccatttcatttaaggttttaggagtatcagctcagacactggaggagtaatcaataaacatgccaattatgtcagagaaaaattatgaatgcctgaatatttgcagccttatttctttctttctttacaaagaatatgcctacctgccttttgcacttctggtaaagatacgaggtaggcagacgtgaagatttgcaaagaactgggacagactggcaaccttcccttttggaaggcttctagcaagagattagactggatcttagaggacaaagcatgggggtacaaagacaagtttctgtggagactgagaagtaatcctggggaggaggggatacgcagaaaaagtgaaaaacacagagagaaaagagcttattaatgggaacttcttgctgttctgttagtttctttaagctcctagggtagactgaataactttttaatgcttcttaattgtttctctttatacttgacttcttgatgagacaggaccatgaaggaggccatctttattgaggttacataaccttcaatatattcaatctacttcattaatattcactgaagttacaagaaagaatgcccacaaaagaatctctttattttcctactgtcatcccttcttccactgagactctgatattttttgaaattacatgtttttttagttttttgggctcctttgagtataattgaaggaaatttctatcctgttctccattttcgctaggaaattgggagctacatgtgtaaggataatgtttattgattcttagaatgaaggatcttagattatctctcctccaacatcctcttttaaatatgaaaacatgtagggatttgctatctttacaaacaaataaaacccagatctttaggtttggtaatggaagtacctctgtttgattaggaacagctagaccttgaattctgattctcatcccttgagttgcacctttctcctcaggcatcctgctagcctttagaggtcgctgtcactctagcaggaaagggatcgagaaaggatccctactagttcactggtctcctctcccatcaccctccccctttttcattcattgccatttttccaaagagctgagtacacactaacctcaagacattttgtacttctaaccttttgcctacaacacttttcttcctcatatttccaaagattgctccctcctttcttttagaacttcactgagatctttccagattactgcatctattacttcctcttctgtcagtctctgctccttacattaccttatctttttttagcacttcacaattgaagttttatttatatgtttacttgtcttttggctgtcccttttactaaagtataatttccatgacagcaacattccttagtctagttatatgggatttagaataatgcctggaacatagtaagtgctcaatagttgtgaatgaatgaatgttcttctgttactgttgagcacaggctgcaatcactgaagattctggtaaataaggaggtggggatcgtttgatccaggaaacagtatggaatgaactatggaatatcaagacccgggattatatactggttctgacacttattagctgggtatacttaatttacttaaactctctcatctttaggactttttccatctcaaaaggggtttcaactcaaaaacaggtagtttggtggaataaaagtgaacacattaaagcatctaccacaatatcaaacatgaaggaagcttcatttaaaaattgataactatgcaatttgccttttaaaagttaatctgcttcttagaatttataattcatatcagatcttaaattgcaatttactttctatttttatatataccaagcagggccacattctggtaaatctgttctaatattttgaaaaaggcaggggattctccctcctgaccacataaagccagtttccttagaattaaattttcctgtgaggaacagaactagaaaaaactattttaagatgcatgtgtaactaaaaaagaacacgaatagccaagacaatcctaagcaaaaagaacaaagtggaggaatcatactacctgacttcaaactatactacatagctacagtaaccaaaacagcatggtactggtacaaaaacagacacataggccaatgggacagaacagagtccagaaataaggccacacacttacaactatctaatcttcaacaaagctgacaaaaacaagcaatgggaaaaggactccctattcaataaatgatgttttgataactagcttagccgtatgcagaaaattgaaactgaaccccttccttacaccatatacaaaaattaactccagatggattaaagacttaaaggtacaacctcgaagacaacctaggaaatgccattgtggaaataggaatgggcaaagatttcatgatgaagatgctaaaagcaattgcaacaaaagcaaaagttgacaaatgggatctaatttaaaattaagagcttctgcccagcaaaagagacaatcaacagagtaaacagacaacctacagaataggagaaaatattataaactgtgcatctgacaaaggtctaatattgagcatctttaagaaacttaaacaaatttacaagactaaaacaaccccattaacaagtgggcaaaggacatgaatagatccttttcaaaagaagacatacatctagccaattcaaacatatgaaaaaaagctcatcatcactgatctttagagaaatgcaaattaaaaccacaatgagatattatctcacaccagtcagaatggccattactaaaaagtcaaaatacagcagatgctggcaaggtggcagagaaaagggaacacataaactgttggtaggagtgtaagttagttcaactattgtggaaaacagtgtggcaattcttcaaagacctacgaatagaaataccattcaacccagcaatcccattcctaggtatatacccaaaggagtataaattgttctattataaagaagcatgaatttgtatgttcattgcagcactattcaaaatagcaaagtcatggaatcaacctaaatgcccatcaatgacagattagataacaaaaatgtggtacagatacatcatggaatactatgcagccataaacaagaaaagatcatgtccttttcaggaacatggatggagctggaggttattatccttagaaaagtaatgcaggaacagaaaatcaaataccacatgttctcacttataagtgggggctaaatgataagaacacatggacacatagagaggaacaacacactgtggcctctcagagagtggagggtgggaggagggagaggattaggaaaaataactaatggctactaggcttaatacctggatgatgaaataatctgcacaaccaacccccatgacacaagtttacctatgtaacaaagctgcacatgtacccctgaccttaaaataaaaattaaatttaaaaaacttaaaattggtaactatgtaattttcctttaacaagttcatctgctttttagaaattaaaattcatattgtatcttaagctacaatttactttcttttttttttttttttttttttgcagttgcaagatttaatagagtgaaaacagagctcccatacaaagggagaggacccaaagtgggtagccgttgccagctggaatgactgggtttatatcctgatcattgtccctccccctgtgctctcaggcgacagatgattggctacttctttacttcctgtttttccctaattagcattttaatgagctctctttactacctgattggtcgggtgtaagctaagttacaagccccgtgtttagaggtggatgtggtcaccttcccagccaggcttagggattcttagtcagcctaggaaatccagctagtcctgtctctcatcacctgggagctttggctctttgggtggttctaaacagcatcaaggttgagaccaaggttatctttggggtctccaccccctgaaacctgcccctacttgctagttcctgccagggagacctgggtgatcagcttccctcaaagcccagggcagaagcattctggtagccccaggtgcctagagactggcagaagggagacacttatgagtcactcctccacttcttccagagaccatactgttttgtttgtttgtttgttttttgaaagtgtcaaaaagtcgtgagaacaaagcatcccctctgtgctgtgagtctgggaatctggaatagaaacagaagttctcatccccagggacacctttcctggcactgctccccagcctcctcccagctccaggctgagaagggcgtccctccccgcgtccctgcagcagccagcactgaggtcggcctccaccccagccacagtgtgctgccatgttgtgtttccgggcctgtccccgatgtcaaatcctagaggctaggcctcttacaatttactttctaactatttgtatatataacaagcaggggcaaatctggcacatctgttctcaaattttgaaaaaggaaaggggttcttcctcctgtccacataaagccagtttcttcagaatcaaattctcatgtgaggaaccaggtaattaattctagatttgagacaccttcaggagaccttctctctactccgctaaaggtctcaggatatgtccgttactaaattaggaacagttcaccaactctggttggagaattgtttcatttcatggtcgtagagaaaggaaggttgacttgattgttagctaactttcttcgagataatccaaaatggaaaaagtaaagaatggttttactttgccctttgtattacctggcaaatttgacagggtctctcatgggcattgtctacaagagtgaaacaaatgagagagctttatagtaatgtagcatatttaggtcctttcacaaagtcaacccttgttaaacagatcataattcatataaaaagaaagctctccttcttaccagtttaagttttatagtccaaaatagagcctttgaactctcttcaattctaaaatgcatcactgtgatgcctgcaattgactgtactatttctatgctggaaataaaatgagaggcatagctccaggaaaatggccctaaaaataataatttttgcatgtgcctcaataatgttaataatatctaacatttgttttgtgtctttccatggttcataaaagttattcccctgtttaccttacataatgctgcaagttactcccaatcttttattcattcaacagatatttactacatgctactctatgccagatttgggattgagtgttcagtgtaaggtcatataattctgttagttagggaaattttacattgctggtccgcttttacaatgagtaagtggtgaaactgagttgtgaaaattaagtctattatcagtaaaaagatcatatatatcaaatccttgactatccttaatttgtgaaaactacatcaaatatgactttttcctataaggaaagcttttacagattcctagatggttaaatttaattgcttctacatgttttatatctaatcattatatgccaaaaatacacattatgttcaatacaaaatatttacttctttgattatgattatttttaggtaaaaaaatgaatatgctgccaagctgcaattactatatttagaatatgtacaacttgtgactagccaaatttgcaatgatcttttagaaaataggggaaagatttccagtgcctattttaggtaagaaagccttcctgagagacttattaaatattaaatgctttattaagaaatttagagactctttatgcagatattttaaaagcctgacagatatatccaatgtcggactgaattaagttcaatcttggcttattcagctgagagggtgctttgctgttgtggagccataggacagttgtcagggtgccttccacgctggaaaatacataagcttgctaaaattgtgcaggtgcatgcatgtgtgcatgtatgtgtataatctactgcattctaggaactacattatacttgggggatacaaagataaataatgcagagaccctatactcgagagacatttaaattgttaaaaaaaggcatataaataaatgagtgagctgaggtgttccacagataccaaattagaagtgtatataatagactcacacaagaataaatgaaattgatttataatttaaaaaatatttaatgtctgctttgctatcagaaagaatattctttaagaactaggactttttctattttattcattacttagtctttcatgaatagcacaacacctgatatatagccccatgttcccaatgaattttgaatgaatttcaggcaagggtgaataaataagttgaatgaatgtattaaaaattaattaataataagttattttatgggaatttggtggggtgggaaaagcggtcaggaaatattttatgaaagtgattaagcaggaaaagagagaagccagttcagaaagaaggagcagcgtaagcagatctgggagattgtgaaaggtctcagccctttttgagaagtactgtatgtggaaagtgagatgcacacatttagatcatgacattggatggccttttgtgttaaggagtttggacgttatccgataggtgggcatgtgggtgattaaagtaaaatttacactttagaaaggtctattgacaatttgaatccatataagatacctttagtgctcactcccagtggaaaaattggtacctatctaagaaaaatatgaatttctggacagctattcaaccttctcctggggtagtctagcactaaactagtttatcactttgtttctatagcacagaagggtgggtattgtattttatagtcatttctatgcattgtttttacactaaacatcttcataggcgacgtcgttgccaagttatttatttatttttatgattgcttagattgatttatccatagatgtttacagcacaaatggtctttaacatctccttgaaaaactcagtttctaggacctggattaaatttatattgtattgattagtatgtgattcaacttacatgacagcactcttcaaattgtcacaatttcagtaccttgactcttgaattagaaaaaataccatctcaggtcattacacctgtaaatcttttacctactgaaagcaaggttttcattctagctgatgcctccagccttgttaactcatacctgcattgtaacatagagctttcactttgaaaccagaattgtatttatttctactaactgagttcactgcatcctgggaattctttcagcctctagcacaggaaatatatgcttaggaacagcatgaaggaaattgagatgtgttttcttgacctgagttggagttcagtctaagggtgcgtatgtatttgcttccttgttggagaatcctaagtgaatgctctactagaaaggatcctgatgttttacattaaaagattcctccctatctacccccacccccacccccacggggccccgatttgttttttcctagggtggttaacatgagtttcacttgaaatcagagttacacctgggattatgacttggaattctttcttgttattacttttttttctttttcaagtaggttggctaattatatttacttgtggaaatgtggggactctatgctttttttgttaaaaaaaaaaaaaaaaaggttgtgcccctgctctccaactacatttcattatagaagtaatattaagaagttattttgtctgtctacatttatttaataatttgatcacaggatattgacatgtgtattaccctcagccactctgcaggaccagtgaggtagacactaggcaatggtgaatagggcccagctcctgacctcaatcagacgagatcgggcgcgttcagggtggtatggctgtagacatcctgacctcaatcaaatcaaattctcatagtagtggagaggaacatgggaatgcattatggaaagttaatgacatttagctcatcccctattgatgaacatctataaattatgatacatcataattatgccacaatactaagcagcatttcatttatgtgtgctaatatggaaaattcttcatatataattaaggtaaacaaacaaaaccaacatactaagcaaaactaccatctttgaaattaagaaaaagaactaaataaacaaattggtagatgtatatagttatgcatttttgaaagaaatcataaaaagtggtggatttaaaagaggtatttttatttttaacctttctatagtttgaatttactaattttttacatgtcctttttccattttttaattcatttttaatatcaaaggggtatctgcactgtaagattatagtgatatttttcttccttgtacctctttctaataaaaaatttcatcttatatgtagtacatagtaatctataaatataaaatacagtatgcaaagagctgtctcagaggaaagtgcaatactctggagccaaggaggagggaggaatgaggcaggatcagaaacagttcatcctggtcaataaataagattcttctaatttcaaaggtgcttcatcttagtaactttttccttggtgctttgccttttagccacacaagtttcgctagtctgttgctacatcaaccaactgatatttcttggaagtgctggtactttccaatttcttggtgtcaaaacattgccttcattcagcaccaataatgttccagccttttccccaaaaagtgaactaaatttaactgtcagtgaaaactttatgtcccgtctacttgaaacattaactttttccacttgaaacaatagcgttacattattccccttatggggcatggttgttccttttagaaccatctttttatatagggaaggaattatcagagaattgttacaatttttttaaatgatggtgttttaatctttaaaacagagaggagatcttgagatcactatttaggccgtaatacaatttgtcaaaaggtgatttcctctatgttgtttctagtcaaatagctgttctctgcttttatcgtcactgtggggcattttctttcttgtaaggctatttcacatagcacagaattatatataaaaccaaatataagcagtaatccattactgagggataaaattaggcatgtgcatgaaaattacattttttcaacgtatgctattttttatttatttcctctttttagtgtatattccctcaccagtttttggcctaaaggataggcgtaaacatgagcctgacacttataaatataatccaggtgatttgtttattattttaaaacaagccattattagaggggcagcatacattcttttaggagaactaactggtttcctagctttcggttttaattctaacctggcccagagaaccactgtaattatatttttgtgagtactcaatctttttgccccattccaaaatgataaagtcagtcataagaactgctcaaacttcattccctattcctgctgatggtaaagagggtagaaagtaagcagttggagaaagcgttcacttagatatcaaaagaactgattgtaactttgccaccaactaccacaaattagcaagcaattcgttaaacttttatttttattttccttactgacaaaatcaagagtttgaattaagaaaattgtatagttatatggcagacaggatctatacgccattcagcatgggattttattacaactaagaattacatacctagctacgccttgcttgttattgtacacaaaacataattaaatactaaacaggatgctaagagtcaaaagaaaatgtaaccaaatagcttcctttgccatatgcaggttttctaactccaaaatataataattctgtgttgtaaccttcaagtaatttttgccatgtaaattgtggttgaaattgaaagcttgccagctctatatctagaaatacatacatacatacacacatatgcatgggggcacacacacacacacatacacacatacacactctggtaggcatcagaagtctatcatgcatagggcacatgtggaaaagaaagtggacgtttcctaacaaaaccttttgcaaacatttcagaggacttattctgcaagaccttcctggatatgacaaacaaaatagtgttttgggataagtgaaaatgattaaaggcatgggttccagcatacagttagcttcagacacttatttctagcatttttccataaatattttttgttccaaatcagtataaactacttctgtctgcatttggaaggactgtggagtgttggagcaagtacaaaagcagttctaagtttttgttgcaaggctaccagttctcaacatcaggtctagatggccccagacgttcttaaagcattttgactaaatcttagcattgcatccactttcctaatttatattttcatttaacaaacatttgattaaaacttgtttttatccagagtaagtgaccgttgacttgttttccatgtgctagttcataatttggcagttggcatggggtgggaggtggggcatatatgcaaaccattgttttaaaactctgtggaattggatgtgatttctaagctaaaggacattctatgactgtagtgctggaggttgacatccattccatgctctacgaatgcctatctatgtctctattatagcagccattgtaatcttgagttttccttttacttggctttctccccttctagactgtgaccactttgccaggagcaaagtttagagtagtgccagtattagttggtattgaatacatgtgggtcaaaaaataaataaaagatggactgtgttaaaatgctcctgagtttcattatcatccttctattagtatcatgttttcatccattagtatgaacagctttttaatgtacaagtcacccagaatatcacacgaatagtttaggaaggaggtttcatttgtttcttttcttttctttttttgaggcagagcctcgctctgttgcccaggctggaatgcagtgagctctcttgcagtgagctccgcctccccggttcacgccattctcctgcctcagcctcccgagtagctgcaactacaggcgcccgccaccacgcccggctaattttttgtatttttagtagagacggggtttcaccgtgttagccaggatgttctcgatcttctgacctcgtgatcatttgtttcattttttcaattgagaaataatttacaacctcaaaatttttctttaaaggtagctcctggatcaaaaatttataacattttaacttttagtttttgagattcttttttaaagtcctttattttgtctactcttatactaagattttataaactcaccttgaataaactgcttctgttgtcgttagcttttcttctccatccagctcctcccactcttattttttcctgaagatttggaacctatctgaaatgaggaatttttaaatttaagagttaaagtaccagaccagtaatgttatagcaataaagaaatatttaaaaccatcaccacagtccaatacaaacactagaataacttaaataaattgaatgttaaaattaaaagtggtcagcttctgtaaggaaagcaggaattctgctgtcgatatcttagatgtcaatatcttctcatcaatagcatattaaagaacattttagtgacttatcaaactgcacgtattttaaattgtaaacagaaaatcaaaatacattctcataccttaattttgataagcaaaatctttgtcattgttttgtttgcttgcttaaaacaccaaatcctataagccatctgatcattatatcagtttatgcattgtatgttgcatgtttaatacaaagtttggaagactagaaatactccactaagcaagcaaacagtaattactcctttataattactgtgcaactttattgccatgtgttgttataattatattttaaatactccccatttgcatcatagaccataatgtcttctagcacattaaagtctgtggcttataatggcatcccacttccacaaagacctcttcttcatttagtctctattttaactactgttaaaagagactacatgaaagtaattggcaccataatcctacagtaaggaaattgtaagcaatatactatttctgtgctactgaagtctctaattattcagagtatttcatgtttaacatttaatatgcattcctctttcagttatggagccagtcataaccaaaacagttcttctcaaatcttaacatacacagaaatcacctggggatctggttaaaatatagattttgatatagttggtctggaaacgggcccaagagtctacatttctaacaagctcccaggtgatgagtccagtgctgctgggttcattgaccttactgtgagtaacatcactttcatgtattatctataactaagtgcaaaatgctgttaagtgtgcacacacacatacacattgcacacatacatacacacggcaaacttcactccaacctctcctatgatcagtttctaccctcagacctagaaataaattaatcctgtcaaaggatttatttaacacaaagagaaacagcattcaacctgtgaaagctggccaaatacacactagataatatcactctgagctgggagtcaaagagggcttccttgtcatttgccagatggaggggtgtgtgtgtgcatgtgtggtgggggcagttcggaaaagaaattccaggcagggaggaactgcccttagaagtgacgagagtgaaattagctaagtgtggcggcgtgtgcctatagtcccagatactcaggaggatgaggcaggagaatcacttgaacccaggaggcgcaggctgaagtgagctgagatccaagatcaagccactgcactccagcctgggagacagagcaagtctctgtctcaaaaaagaaaaaagaaaaaaaaaaaaaaggaagtgacagagtgtaaactattcagggatggaaggatactaataaagatatgatgaaggggaaaaattcttattttctaatcaaagaatttggattttatcttaaaggtatttaggaattacctaagaacaagacgattatgtgaattttagttcacctattctactaatgttttctctgccactctcaatgaaatatttctctttaggaaattaatctgaatttgactcctgaaatttaaggataatatggaaatatattcattgtttttgaaatagcacatttgaaaatgtacttggacacaggaaggggaacatcaaacaccggagcctgttgtggggtggggggagagggggagggatagcattaggagatacacctaatgtaaatgacgagttaatgggtgcagcacaccaacatggcacatgtatacatatgtatacatatgtaacaaacctgcacattgtgcacatgtaccctagaacttaaagtataataataaaaagaaaatgtatttctggaatttttttaaatgtatctagtaaaacattgtggctgtatctgtcttccattataatcatcttaaaattaacagtatataatcatcttaaaattaatagaatcagatgttttaacttagcaatgtcagtaaatataaataggtcattatcaatattcatagcctaactgcttatacagatcccccaaatatcagggtggctaaatttttagacctttaaaaaaattgtaaaatttatgaagacagtgcacaaagagatcttagttgaaagctaagaaaatctcaccctatgacttttaaattttctcttagtgttaaaaacaactatttgaaagttctctttacaataagggaaaatgttaaggtaggcttaaaatccagaatctcatactctttatatatttgatccttggcaatctagaacattgttatttggtaatatttgtttaagggatacctctgctaaatgtttttatgccagtcggtagaagaaatattagtgtaaataactcatttagagaattttattttatttatttaatacaaatgtttaaataagggaattgggaaagacctgcctttttggaatgtaattatagatacgtaattgttttagggagaggtaacaaaaggtagagatggtctcttttaatgaggaaagattttctggaacttagctttagcaacagtaattatttaacattttaatatgggatctggaaaagggaaaccccagtgaaatctattactatgtagatggctcaatagtttttctagtagtaaaatacaaccctgatggatttaaactgccagcagaacttttgcaattgagtggcaaggtaatagtaatagtactaatgatcagaaacaacagcaaaggaacagagagcattcatcataggcaattggaggttaacgcagataataataacataacatgcatcatacctaggagataatgaaagccaaattctggcaatgactcaggaaagggacctagtgctgtagtggccagatgacccaatgacaagctatagcaaacaagaaccattttagaaacacagatcttttccatcaacacatctttttgttgttgttgttgttgaagatagttgcaagttctgtatgttgacgaagcctctatggagttaaaatggaacagaactgatgaaaataaagcttaaacgttccaaactctctgacactgacacatgaccgggtttcacagttgggaactgggaagtggctgacagagattctaatcagtaataatctttgcagcaaacagattcagtatttatttagatataatacattctttaaaaaaaactttcacaatagctctatgaagtatttaacattatttccccattttatacataagaaaaatgagtcacagaaatgtaaaagaaaggaaggaaggaagggaagggaagggaagggaagggaaagggaaggggaaggggaagagaaggagggagggaggaaggagggaaggaaggaggaagagagagagaggaaggaaggaagagagagagaggaaggagggaaggaaggaagaaaggaaggaagggagggagggaggaaggaaggaagggaagggaaaggaaggggaaggggaaggagaaggagggagggaggaaggagggaaggaaggaaggaagagagagacgaaggaaggaagaaaggaagggagggagggagggaggaaggaaggaaggaaggaaggaaggaaatttgcctagtattttgtagctagcaagtaagggagccagacttcaaacccaggaagctggcacccttaacaattaagtgcccccaaagtatgtgttaaagcctatggaaatatgagcctatagaaactacctaaagagaagtcatactctagactattagaaccagggactatcctataaaccttataagaaccattgttaggggaccataaacaaccctgcttcaaagagtagaaatatgtttcataaaagccattacccaaagacgtataaaaggtaaaacttaaataaaaatagattaccatttacaacttggaaaagaaacccagaattttctgtagccactggtcaatgtgttcttacagccgtaaggcagaataaaaatctggaaattatcagagaaggttttaagaacaaaataagcaagttggtctctttttaaatataaatctgacattaacagaagccttatgatattaagggaaaactggtatgggaactaaggaagggagtgaaaacatgctcctcacctatgaattagacatccaagaggacaatcaagttcgatctcatgccatattgggtcactgatggcccatcatgcatggactgtaggactcacaaataaatctggacacaaaagttcttatgtatgggccaattctgcttatatggacacagtgcaaacaggtacgacaagatattttcttcctcaaggatgatacctagcagataaagactgatttctaattcagtattgttacaactgcaggtgtgtgacccgtagcgagccactaaaccattctgaatctcacttccttcactggtaaaatagggaaaaatattagttgcctcatagagttgtagtaaagattaaatgaatgatctatgtaaaatggaagtgcttgataaactttagtctattattaacaccaaatactaaaaaaaaaaaaaaaaaaaaaattcctcttcttggataacattccttggttaaaaaaagactatatttgagtagaaagaagcttctgactgttaagggtgatggatatgttcattatcttgacaatggtgatggtcacataggcatatgcatatatcaacactgacaaattgtatattgggaatatgtacagtttattttatgtcagttgactcaataaagctgttaaaaacaaacaacaaaaacttacctgtgggtgtaatgtgtgtgtctgtgaatgtagttgctaggaaaatttcttacctaacagaggcacacaaagctgccatccctcctcacaagaaattggaaccagtttctttacagcaagaaatgtaaggtgcttctagatttaccttttgtgagaaatttgtaccactgacagtgatgaactcatatgtcagcatgaccatcccattttaatacctgtatgtacctgaatctttaaaatggcaagagagaaaatatagagcaggatgagtttacatgtgatataaatacatagttttggaatctcacaggaaattatgttactcagagaatattgggatgcaatgattgcatttagcatttaggtttttcatctggaatcagaatttacagtacttataacataaagaattaggaatcagaatttacagtacttctaacataaaggcagtgactatctacagatattccatgatgcagtctctcttgtgtgattttcctggcttcacccaagtcactgaagtcagaggctcatcagagcagtcagtgtgaaaaaccacttgtgttcagtgaggcaatgatatttattgaatgctctctctatacagaactgtgtgctctgtatagggcagaaatgacattttgtttcttatttctcttggtcaatggtgacccctgtctctttgagtcattccctccagtactgataaacagagttgctgctaatagtgagctaaaaggatttgacaaaatatgactcccccttagagccaaatgattttcaaatatttatttttaggtacctgtttgattgtactctttttccactgttgattttggaaacaattttgaaattctcattaattccttaaaaatgtttaactttacccagataagtaaatgcaaggaatctagctggggtgggaatgggggagaatgggtgttggggaagttgtcagttatctattaagacaataatgccacatatcaattgtaacatcttagtggcatgaaacaataaagatttctttagcttacacattggtgtggtgggctcagtttatatcacctaggcttatatatttttttctgttgtgaactgcaagttaactctgtaccactaccgatcttggatgtgcgggttcacatgtctgggtggtggctggcattggatgatctagtatggccttggctggaatgttagcatgttaaggatgacgtacctttattcgcatctcatcctccagcaggctaacctgggcatgttcacatatccatgcagaggagcaaaagaagcaactctcaatacttaaacccatttcaagctcctggtcatgtctcatttgctaacatcccattggccaaagcaatcacatggggtcagacctagagtcagaatgagagggctccacaatattatatagcaagaggcaaggacacaggaattggtcaagaattagggcctttagtatcattaatctttagtaaaacatacttttcctaatgagtaacagttgtgcagggtggtcattttggttttcagactgtaaactgacaaattaatatttggttaattcaagcagataaactaagaaattaaccttcccagccatattaatgtattaaaaaagtttgtcaggccactttggctttcattttattcattcatttaaaaatatatttattgtgataacaagcagcaattttccagtcaagcagggatgtgaaggagaacatcagttctcaaagaataattttgccctgttgggttttaaaagattgtcattttccaatgtaattgttggaagagaagttcagacatcagttttggtcactttctcttgggaaatacatttacctgagtcatgtaggaccacatcaagcaatctgggactcacaagttatagccatatcctttggctatatttttatcatgtgggttcacttaacattataataattgttctccctgggattctgactagattttactggaaaattggagtgaagagtgttgggtggagcatcagcttctagccatttagaaattacaggggactaattttttaaaagctaatttgattgcagttagcaaaatgtctctcttttgagaaagaagctcctaatcatctttccaaaattgaatccttcagtttctacagtgcaaacacggttgctttgaggaagaaatatttatccacatataaataccgattatgaacacgtttctgacattactggaagggtcggtgcttgcctctttacttctaaaacaaattcacattctgcttcaactgattattttttcaacaatatttgttatattcttttatgatctgccagtacttttttgaagcccagttagttagaacagcggccaacagagctgagactaaaagggggccaaatatctcttcagaagcaagatgttacttcaaaagatactcattacaaagcactactgtgactcacataatcacttagtttttaagggggagttgttaatgtagaattggtttcttatcttcccagcccccagtgagcctttgctgtgcaaattcgctgatggaggacaaaagaagcgacagaatcaaagcaaatatacccagaatgggaggccttggcccagggaaggagaggtgagtcctgactgataacatttgctctgaaatttggcagtagatatccctcagaaggtggcaaggcagacgtatggtgccatgatgaaattgggtcccatggaacacccaatgtcttcaaaggggcaaatgagcagacccatgttaatgtgttctagatgaaattattgaggagtagaggatttcaaatttaacctcagttctgcactacagcaagtcttctgtctttaaccaaactcaaacctgaaaggaactcactgaaatacttatctacaaagaattgatttctatttgtgtaatagctataaaatgagggtataattacttaacaaaatattttcagtgaaatcaatagggaaagttgaatgtttgtgttttgaaacaggcagacaaaatttggctgtttttcattctgttattgagatgatttacttgcacatgtatgtatatttatgcatattcccatatgttcataaatgttttgatatctgtttatatatgtatatacacacacacacacacatatataaaataagatattgtcttggtcaaaaaagagggagaaaagttgatacatacagcattttgcttttcacaaggagaaggaaaagcactgaacagctcactatccatttaccctcaatacaaactggtaaaaaagccagtttatggatccagtgccacttaggaatgggttctttttgttacttttttgtaagaagacaaggaaaaggtgactgagcttccatgaggtcttttcattatttgtgaaatggaatagagttgtttgaatgacttgaaaaaatgctattttgtaccaaggccatactttcaagagaagagctttatttagtatttcattcaaagcacctacttcatccatttatcatttaagaagcattgtacttgatgtagcattttacactttcaatactgacagaacagtggtaaagaagaaaggaagctggaatttttctcagcaaatcctttagccttttttcagtttctgtttctaagaccattgtttgctttgagtgtttccatgcaggtctcaaaacccctcttaaaggttatagttatgttcaagtactatataaactgtaactcattacattaagacatgaaaaacagaatcatcactgagcatcaaaagctaataaaaaagataaagagttttaatattctcaactttagaaaggcagtgggtattacgttctaaaaaggaggtggagggggtgatccatgtgtttttagcatggagtccagtgcatcagcagataaccctattggcctcagaagacaactgatgcctgatagcactcattatcacatgtcccctaccaaacacccattatctaaaaagactcatttgacattttaaaatttggttggataaaatgcctgctgattagagatatctttgggtcacagactatcatcacaaagccccaagactcaattagcaacttggcattaatgacagaagattcagtttctgtctccttaaggaactataatattaccttcatacaatagatggcaattgcagcaagacacttcctctcactgtacatttcttgaaaatggaatcaataaagacaaaatgtagagagttacagctgccacctggctactgtatatagaatctaagactttgcttcaaagcatgaaaaatgctatatgtactatgatgtggaagcactgtggagttgagtttaggacccagagcaccttataatttaaacgtaggttttaaaggtatattcctaatctttgttttcaaaagttgatttttaagagctataaattttcctgttgatctatgaaaatcaagggaccatgataaaatttatctgtgaccaataaaatatatttcaaatatatatacacattgagagaagatagattaggcagagagatagcatgccctagaaatatgcttatcaaattttttggtttggggatgcacatattaatttgtacactttgattgtggtcttagaagtaaatacccaaagaatgttggataactgtgtgcccatcactttatattttttgcttccatttcccccttgcattttacttgctaaagtatattagcaagttgataaagttgtcatgatacacattaatcctatataagcaatatttaattaattttatatgccaggaaattctggttactgtatttgattctaagacacatgtttttgttgttgctgttttccacactttaaagcttctgaaattggttctcttagactaagtggtattttacaagataatatgcattttctcctgttaatcacttgagggcactacctacattgtcgggttaaggtctttgaccacactggtttcataaataaaagcactaaccaaagccaggatctgggtcagattcttaagggagggttttttgtttgtttgtttgtttgtttgaccccttccttcattcagtgtcatgactgagacaagtaactttctttggtgtctgtttttaatgtgtagttttgtttttcatttaccattatactaaggttggcaaaccaactttataaagagatcatttggggtgtttgtttttgcttgtttgtttgttttgatatatgaaacaatggtacacctttgaatccttttcttagataaaatgaaagatggtagtttagattatgctgctgtggaattgaagataatagcacagactgaggctaatgtttacttttcctctctcctaaaagatgagtaaaaatggtcatgtgaaagggatttctgacgaaattcttaggatacaaaaccaatagattacaagtattttagaagtaccatgcgcatgccaattgatagactaattaaaattttaatttactgtttaaagctgttttttcctcatggcattttgataaaaattttattagcaaagtttggctaaatgcacttctttatgaaaaaatctaatacagaaaacttcatacacagaaattagtataaattagcaagattttgaaatataaatatatgctagtggccatgttctacataagtgaaaaatgcaggaatattttaaaattattaactaatctttcaagagacaattggaactctgaataaaatgatcgagggatgggggctattaggctcttcttccttggtgttctacagttcttattgttttatttccttaagtagctgttctcaaactcttggtctctggatccctttatactcttaaaaattattacttacaacaaaataaataataacagaaattaactcatcatgtgctaataaaaacagtatattttattaaaatatattttttaaaacaaaggcaattttttgagaaaagtggtggacttttctatttttacaaatcgctttaatgtctggctcagtaaaaaatggccagatttgtgcatgtacttcagcattctctctttttctatactctgtcttgctttaaacatgtagagaaaaatctaccttcatctagataagtcatttaaaaagggagaaccctatagatcttctaatacgatcttaggaattcttggtcttcaggccacactttgagaaccactgtcctaaagaagctgaagccaagggcaaggctgatgttcacttccatatactagaaggaccatgcaacttgttggtatattaaaatatatcttatcatttggtaaatagacactgcccctaggccatcagtgcaactccacttccccttcctccccggtgcctcctccaggagcatcatgatccagcaagaatggggtactggctggcacagcaggatttttatacatgatgtaagggaggggtccagcttcaattttctgcatatggtgagccagttatcccaacaccatttattgaatagggggtcttttccccattgcttttgtcagttttgttgaagatcaaatagtcataggtatgcaaccttgtttctgggctctctattctgttccgttggtctatgtgcctatgtgtttttgtagcagcaccatgctcttttggttactatagccccgtggtatagtttgaagtcaggtaacatgatgcctccaactttgttctttctgcttaggattgccttggctattcaggctctttttttgttccatatgaattttaaaatagtttttttctagttctgtgaataatgtcattagtagtttgataggaatagcattgaaattgctttgggcagtatgaccattttaatgatattgagtcttcctatccatgaatatgggatatttttctatctgtttgtgtcttctgtgatttctttgcatagtgttttgtaattctcatcatagagacctttcacctccctagttagctgtatttctaggtattttattctttttgtggcaatcgtgaatgggattgccttcctgatttggctctcgacttggctgcagttggtctataggaatgctagtgatttttgtacgttgattttgtatcctgaaactctgctgaggttgtttatcagctgaaggagcttttgggctgagactatgggatttttttagatgtagaatcatgttgtctgcaaacagggatagtttgacttatcttcctatttggatgccctttatttctttctcttgcctgattgctctggctaggacttccaatactgtgttgaatagaagtgttgagagagggcatccttgtctggtactggtttttgagacgaatgcttctggcttttgcccattcagtatgatgttgactatgggtttttcataaatggctcttattattttgagctatgttccttcaaaaccttgtttattgagagtttttaagatgaagcaatgttgaaatttattgaaattcttttctgtatcatttgagataatcaagtgttttttgtctttagttctgtttatgtgattaattgcatttattaattgtcatgtgttgaaccaaccctgcatgccagtgatgaagcctacttgatcatggccttttttacagcatttggctgtcactagctgttattaatgctaatgtaaagtatgtgcttttgggcattcttagaagtgagggacagaagacacactccgtaaaatagcccccttgtctttagttgaatctgctcttaatggtgcatccagctcattaaacatttgaccagtcaccagtcagcatacttataaatatgaaaacttgacaatgcagtctgggaacacaacatttctattagctttgaaggcatatggggtgcaattgaattttataatactgaagagtggaaacttgacatttcagagacatagaattaaaccactggagataaaaataaggagaaactgaagcacaattcctagaaaatagtatatctaaagaattatttggaaaacctggtaataccgtctaggcttagaatatcttagatcattttccaaggtaagggcatcatctacatagtttatcactattttctttgtttataccacagtgcttggcaattcgttgtccaaatttttatgtttaagatgaccttgaaaaaaattaagatatgtctaccaacactgccaggttctgcaaatagtctttttaaccttaaactgaaggagattatttacatatgtgatcttgaaaagagtttttggccattatgatgcatgttagcacttgcaagttggttttcgtaattagcacaccagatatggttgtatttattttatgtgctttatctgcaatttagagagcaagctcaaggttaatggaacttctagtcttaaaataaaccttttttttggcacaagaatttgaattctcaataattcagcatgaaaactttcttatttagttaagtgttctattttaaaggtactaagcccaatatttactaacctatgatcactaaggataaaaggtaagtcatgtaaatccctgtactagtgtaagtttggattaatgtaattggtgatgagcttcagtcctctgcctagcctatgttctcaaggaatagggcagtataacatacttaggttcttagggcggggttggcagtgggaaatttaggaagggcttaaggctgggaagattacagcaagtaattacaagtggaaaagttggcaggaaatatccatgtaccatgattgggtctcctgacccattctccatggatcaagacaactatatgtggcacctaccaactgggagatttctggagttgttggtagtgtcctggccatcccagcctgccacaagattcagaattacccccactaatgtttaagcaacagtttacaacctccaggtaacatcaaactataactggaacctgaaagaatatgggtcaattagccaaattcctggaactctcctctatctagctgcccaggctcatcttagtagcaatctcaaagttgtatatttttcatcctacttaaccatgttatggtggggtttaacagtataggtactacatcattgactataagacaccattgattaaagatgaaatattactttaaacaccactaataaaagaaaaggaacttgacatactataaaatgctatcaattatcatttaaatcccaatttcacagatattaaaatgtgaaaaaaaaaacctgcatcttggaatctatgaaattcagccatttaaattgagataaaaacagatgaacctacataaaatatggtaacactgttttgtcttttttatggtatcaattaaggattaatttaactttggttttaatgacaaactcagattaaaacttttttttccaagattttgagatctttagatagctatattatattatacttttcttctgcttctcgtttagcctagcattttctgtgccatagtctttctcaggcttccagtcttagttctgatggcatctttctatcttgtccttctttattgccatatagggaaaaattctgcctgatagcactacgttagcaaaagccaaaaagaagaaagactgtgacgatatagtgcatgtaaataacaatattaagacccctttgatgttcttttctcaaacataaagaagttaattttctctgttctctgaccatttagctacatttaaaggataaatcccctgcatgttattggcttgatttttgaaaaacttcttgaagctgtcaaaaggacttttaatagtttttctcttatcctgattctaggccagtaatttcatgaagaagggcctccaggttttcagcttattctaattcctcctaggttcctgcctgtaatttggtttgagcccacatcatcaggaaggtctcttagcaatctcagtaataagcttgcttccctctatctctttgaccaatcaaaggctaaaaaaaattatctttagaagttcagctaagtcaagctgcagcttttccaaagtaaattttactaacaaaataggaaaaaaaaagcttcaaaatattttcaaataaaaattaaaagttcaaattcaaacatttctttaggtgaattattcatgtattaattcatttagctaacatttatagagcctctgcaatgtcccaaacactgggctagaaagaggcgatatcaagatgagcatgactagctgggagacacacatggcaaagcatggtcatattagcttccaccatgggtcatgggaggaggacaaaggcaatagttaatgccttcagtggcacctggagaaagagctggctttaagaggctatgacatcttatctgaggctgaaagaatagaatagaaatattcccacagaaagtaatggagaatttccagccaaaaaccacccctgcgaaggcccaggggtaatgctccagggcaaggcgagtgtatgtctgagtttggtaaagggtgaagtctagaggtgaaaaaaaaaagatgtggagaccaacaggtacaaaggcacttgatcatgagatttctatgggccagattttatcttaaggtaacaggatgctgctgaaaggaggaccataatgtggtcagatttgcctctcacaagagcaatcctcataacacaatggtgtgactgatggattggaaagaggttttgagcaaatataggagaagatattataccaacatatactcataaacaccgaaacaagagatgataacttgtaagaaggcagtaatcatgcattgaacttactagttaaacttgatgatatgtgtctggaattcaggatacaaacttgactttgagacaaacatttgggaatcaccaggaaataaataatagttgggataagaaagtgaatgtcaccactgtattgcagtaaaggagagagataaaaccctggccccctgagcactctggcatctcataggcagttgggtcaagtaacactaaagaagaaattgctttctgagaggtcagaacaaaaataaggggagaggatcacagaaaccaaagaagaaaaatacactggtcaaatgatgcaaatgaatgtaattattatttggaatcaaagtattccttggattcagaaattatgaaaatttaaagagtatagtgaggaccatttcacaggttgcttgcagccttttgtagaaccattagcccagattttactgtcttatctcagactgcatagaccttgggaatttccctatttatgatcttatttgtagttcatcttctcttcaagagagcaaataactgcacagtagcctaaggagcatccctttagcaggtgagagcagataactactgtacagggttgactgcctctcctggtagaaacaaaccattcagtagtctcctgactgtgccggagttgttccccggtaaaattctaccacttgactcttatgaaggtcagaaggtgatctgctcatatcccctttcagcaagtgaactaataaattgccctcagttttgctctaggcatattttttccgagaatagtttctcccttgacaggaagaaggttaaaaactctttctctggccaaaatattggcttaatgttggccatctagtaccgtggtcctcatcattcttggcattaggaactggttttgtagaagataagttttccgttgacaggggtgttggggagggggttggtttcagggtgaagctcttccacctcagatcgtcaggcattagttagattctcaaaaggagtgtgcaacctagatccctgtaatgtgcagttcacaatagggttcccaatccaatgagaatcgaatgcccctctgaaatgacaggaagcggatctcaggcggtagtgctcgcttgcctgctgctcacctcctgctgtgcagcccggttcctaacaggccatggatggctactggtttgcggccccagggttggagacccctgatctagtaggtttctgatcattgatgatttttattggtttctctgaatatcttagttatatacacttttagtatcacataggagaccctcaatttctcagccagggtgtagccatttgaatttctgaattcttagtggtttccactactagaaacactatatcatttcccctgaattttctttctttattactgacctcctgcccattctcaccttgacccttctggttgtagcaatcccattctgtcctacttttgtattctactgacccagcaaagctaaatgcaccctgacattttcaagcttacttctgaatcaggcctctgacctacattactttcataaatgatatgcccttttttccctcttaaaaattttaagacaagtcatagaagacataatatgctttataaattaaaggatcccctcaccccacattatggaaatagtattacaaagaacttttaaaactcaaaagtcatgcctgtaattccagtgctttgggaggcaaaagcaggaggatcacttgaggccaggagtttgaaaacaacttgggtaacacagtgagaccccatctctacaaaaaaaaatttaaataaaattagctgggcttaatggtgcacaccagtagtcccagctactgaggaggctgaggcaggaggattgctagagcccaggagtttgaagttacagtgagctatactgtactccaacctgggcaacagagtgagaacctgtgtctaaaatatttaaagtaaaaataaaaataagtcaaaacaatgcatgaaaggcaaaaaaaaaagttattgttatactacgccagtattttaacattttgttgaaattcatttttagttttatttccagtcagagatatttaaaatatttgctttcaacacatattgtacacataattttgtatcgtgacttgttcactaaaggtttctaagtagaaatactagcaaataaatatgagcaaagttaagtgaaattttacttcagtagcagtacctagatgtttatgtcatcataattttaagcccctttttatacataatttttaattaacttattttttattgaatttttaatcttaacaagtgaacagttgtaaatattgttaaaattggctgcaagaaataaacactttaaatataacatccagaaaacaatattatatttgtgtgtattagcttcttggactcaacttgtgctaattcagtatacaatatttaataaaatattcaacattttctatacatttattaaagtgttgttttaattatgattgtagaagactataaatctttataattatttgtttgtaatttacccaattatgtatcaggccagacctcaagaaaaggagaaatattaggctaaaatatcaatgttttatttgtccaggaacttcagtctgtatcagtttgtataaattttgctgcccccaattttttgatccccatttatcttgcagtctaaaaatactttcaacaatggttaaaaaaaaaaaataattcaggccatcatcattttggctttgttacagtcaatgattctctgctcctcaactaagaccaagcattgcagtctaggtaatctttctgaagtagcaatgcctggttcctaatgtgtactctttaagcagtatttccacaattattacctcttgatataatgtaatcatttacagttaagaatatcaaataactatctcctaagtcaactgatttgtctcaatgaatttattaaaaataaagatgcatttgttaataataaaaatcccctaattattccaatataccattgaaaatcttttcttctaaaatatttagctcctatagtaaaaatcctgtctggaagatctaaagtgtcctattttggctgaaatactaaattaaaacttaactgttgttgaaaaatgacaaaaataccccactttattttaaataaactatgaatgtctctattacacaaacaatggaaacctgaaaaatggaaaatatttctgaatctaataactcctttttgaaaataagtgacaattaaacatcacttttctacatacatggtgtgacattttcattttgttccaaggtattttactttttgtgtgattcttgagtttgtaaacatgccataatatttagtgattgtataatgatgatttcatggtcctagcttagtataaaggtagctcaacagagcagcaaaatcaatttccttttttcctttgtggaaagagacaaaaggaaattgaatgcaaagtttgcattaagaccatattagaattatgactcaacaatctattacacatgaagtggaaaccaggtgtatccaagtgttagttattgtgctattatattcagccaatgggttaagttcaaacaaccctttgcttaacccatgccatgttgttacccacaatgttccaaatgcatatgacctgacactatctcttgttgtctcctcttgccaaaggtactcagaggcaggactgtccctaggcaaaatcgtgaagtaggtgaatcttgtattcattcccgacccttttgcaatgaaaatctcaccttagattctctccacctccctctcccaaggtacctactctagttactcattcctctggatttaccctctgttttccagggagctcatgctaactcctgttccccaatcactctttaagtatataatgtccccgctctgaaatactcagtagctcccccaagaggagctgggcaatcaagatcctccatccttaccttttgagtcttatttcccactctcccctttacatgttctactgaaaacagctcactcacctttccatttttatttacacacctttttccatagtactcctttttgcctgagctggccttgacctctcatctccatctgtggaaattctcctcatctttcagggctctgctcagctgtacttccctacatgccttatctgatcacccccagcctctctcatctgcaccccatccataccactcatatggcacttaacacatattgctttgtattataatatttatgtatgtgtcttgtctccaggcactgtgctgggcgctttacaaacgtaatctcttttaaatttcacaacaatctgatgaggtaggtattattaaaccatttaaaaattgaggaaactcaggctcaaataggttaaataatttgcccaaagtcacactgctacaaagtaacagagctagaacttgaactcaggtctgtcttatttcaaaacatgatttccactgtaccctactgatgtcaattcctttccatcttctgaaagataggatgggggtttaagatgaagaaggaggtcaacatagattttttccttaacaaatgtgtgttgaagaaagacagtttattgataattactgtattcctagctagaattgattggttagctagaatctatgaggaattcaagtaaaatgcaagaaaaaattcttaagtggccagaacaaacaagcatggcataaaaagaatgttcaagacagtttgtaattcaggaggggctagatagcattggtctctttgagcaccgtaggaaaataagtacaaggaaaaagaaataaatgtgcagttgactagggaaggcttcctataagtccccaggacttaaacaatttgagataattagtagactgaatatatgactatcatcctaaatctctcatgcactaataatatctcgattgaatgtaaagcccacctgttttattctgcctgcagtgccgcatcttggataaattaggggagagaagcttagtgttcctaagagggaaatctaattccaaatggacagcttttacgactgccctttcctgtgcctgagaccagagagtttcagctaagtcctagacagctccattctgtgttcagcctaaggccaacctccagccagtcatgtggcagagccttcatcctgggaagaatttaaacttagaatctttgttcatcttgacaccactatcttcttgcctctcccatggcaaaaaaacaaaaaccttttttcttttctgctgtcgtattctattctcatttctcagtcccccagcttgtcatattatcagttgcatatttctttaacatgaatgagattcataaatttaaagaggtcatgcagttatcattaaacatgtgttctcagtgcacctctgttaacttctgacagtcatttcaattctgtttgcaaactccgtttcaatttatgtatgctccctttataccaattccattcacatgtgactctacacttttgttcctcataccaatcttcataataatttaaaatttagtatttatggaaatactgcatgcaatctaagcttgaaagcagcaggctatactgtacatcaggccctctgttagaagattgagaattttcatgtcaattataagctaaatttgaggatttcaatgagcccaacaagaaaaccatcctcaaccacaatggaaaaataaaaaaactcaaacaggcaaggtattttgttttctttaaaatgtctatggtttcttatcctttacaaaactcttcatagctcatccactttttttctaactttttattttgaagaatttatagactcacaggaagttacaaaataaatgtacagtgatgtcctgtttaccttttactaagtttctcccaattgttatattttaagtaattatagtacactatcaaagccaggacattgatgttgatctaattcagttttaaattcgaaaaaagaaaaaaaaatctaccctaaagataacttacttgaacagttttaaattccattcaacattgtaagcattgtaagtattaaccatgctgacagtcctggtaaacaaaggatggtatgcccatatggccacagagaaactttccccatattgttggatattgatactcaggtctaatttaattcttgggccaatgtcatagctgaggaatggaaaggagcccatatcagaagacttgggttgaaatctggttctgcctccaaatgtgtgaccttgagcaagtcacttgacctttccaagcttcagtgtcttcatctataaaatggagaaaatactcctcctgcctacttcataggattgttgtgaggatcaaatgtgatgatgtacatgaaggaacaaggtagactgtgaatcagcactcatgaagtttatattcttttcagaaactatatccagttatagagaagtgtactttttcagaggtggtcttattcctaaaaacaaaacataactacctccttattagccatgtgttctagaattttcttcatatgtaaatgacctcccctttctatcactcttgttaagataagaaatagcaatatatcaaacaagcactctggactcattacctacaaaccccttaggcatatggtctatttttaaataaatacttttttaaacattttcttctttaagattgaatgcatttttagtagcttttatttttatcctaactgcaggattcgttcttacttttttatcatgccatgagatgtacaataggtgttcttgacaatagtgtgaaattataacaatgtgaggttagacagtggatgttttaagaagtaaaaatggaaatcatccaagctgcattgtttcttggtatgtctgaatatataatataaactcccaactcactggtatattctggtttgtggatagtaaaaatgctagtcttggcagtaagcatagagatatacataggagaaaataaacttagatcatggaaagtaatgataagagtctttgtgtgtactaaatgttttgggcaccacaataaaaacgttaagatttgttttcttccctcttcatcctatatacaggctggcatggctttgacctatgaccccacagctgccatacagaatgggtaagtagatcacattttctctattttaattgtgaatagatctttgagctctgaatcaacatcaaagaaaaatgttaaaatttgttttgcttttgttttacatccttaaacacaaagtttaaaccaagcatttttcatcattatagtttttttcatcctataaattattctgacctcccattctcacaatgcctctgcccacattaaaccctgttctctctctctctctctctctctctctctctctctctctctctctctccccccccgctccctccctccctccctctttctctgtctttggagaacaggtaaagctaggctgagagaataataactctagagttagctttcaaacactttttggtgtgtgcccaagtcaatttattctttctttctggtgatcaggggaatggtaatggaggaaagtcaagttggtaactcaggtgattgcatcttcattttcataagcatctggaaatttgtatccacctacttagaacaagtcatatagcttaaacttcctcctctgaaaaacaagtgtgaaactacatggtgtggcaactctaaaattctgtgacttctaaatatctttcattgaaactttcttcttacttcctaatgtctttgcttaggctgtcttgtaattgacaataattattctttggttggttgcttatttcctgtcactgtcttttattttggaattctccaaggctttcagttgtctgtctttcagtctcattataaaagcctcattgaagatcaacatagagggtagaatgaattaaacttcattttctattttgtcagttgcctctaaagaaaatctgtgggatattgaaagtatttaaataattacctcttattcttatattattcattcaggcagtcatatagtcagtcattcaacaaacatccagtaagtatcccaggcacaatgctatgttctatagatttaaaaaaacaatgtatgatatgagaccctttccttcaagaggctcacaatctactcgtccatgaaaaagtaaacattaatggtagactagggtaggagtatagtcctttgtccttgggttgattaaaatttccctctagaagtgaaaattaaggatatcttttcatatatccaataggcatttacttatttccaacaaaattctataaactgggtgtgtagaaagaagtaaagatatggagaagaaagtcctctagaattatattacgtagttggagataaataattaactcacaaaggaaaaaataaggcattatatattaagtgatagtgactgaaaatagatgttataatggaaaggaatgacatttattgaacacatattttgtgcaaagtactttgtaatttagtggcacatggtttcaaatgaatacatgtgattacaattataaatttatattggaaatttatacaaaggaaaatagaaacaatagttcaaaaaatacctgtatgtccagtaattggattcaataaatattcatattttataatattttacatgcatgcatatgtatgcacatgtgtgtaatatatacatatgtatctacctatctagagtatgtattatgtatgtatatacatatctacctgtctatagtatttatctatgtatctacttgtgaaaagtaccttgttgcccaaggctctatgccaaggattggggatgcagcagtgacccagacataacttgtttttgcatttatgaaacttacattgttaaggatagaaataaaataaaaattagcttttatatataattatgtagtcaattattaaaattgtgtttagcatttttaattaaaaagatagtttttgctggaccatatcaaagtaaaatttaaacatcataatatttctaacttcttacatcttcgaaaataaagacattagtcacatgataaaaatgtcatcacaaaaaataaaatcagtagtaatttcaaaatatcatctactatccagattatttttcaactttgctcagttgccccaaaatgtattttacagctggatgattccgaagcaaaatcaaaaagtcatatcaaaatagcttatatggattatttcatttatttattatattcttttgggtgagtgttaatatcccatttacagataagaaaatgaggccatgtagtccgaggtagagctgggaatcgaatgccagtctgtaacactaaatagagcctgctgtctttgtccagctaggacaaagggaaggctatatggaagcaatgagatttggcatagattatccaggatgacttagtttatcaaggatagacatagggaaagatgcttatggagaaagtggactgctatgaatggaagtggaatttgtagagattaacaagccaacaagttttactggggtgaaagtttcttgtgaaggaattttataagtttaaaaagtttttttgttgtcagatttggaagttcaagtatttggtttttacttcataagcctggggagtaattattatttttttttttagcaacagagtggtgtaatataaataatgaagactatattggagcaggaaaatcctcttagtaggaagcatcattaagaggatattaaaatagtacagttatagaagtgtgagagtttgttctggagtggccaatgtatgaatggaagaaagaaaccaaaaggagagacaacctgaagaaacttttcaatcatgcattaagcaagtggccatcaaagaatcctacattcagggttctccatcaagggctggggacatactggtgaataagacacacccagtctttactcatctacatagtagcaaaggaaatcaacattaaaagtattttattacttatataccataagcacccattggtgaactgcagggtgttatgaattgtctagtcttgcttgagtggttaaaacttctctaaacaagcgattccttgagctgagctctgacaacatgtaatgaccgaccgaaactggatgttatatttgatggcaaaagagagaaacaaaagtgaccctgtaccatcagcagaaagacaaggaaataaagtgaagaaagatgatgatatggttaggctttgtgtccccacccaaatctcatctctaattgtcatcctcataatccccatgtgtcaagagagaaaccaggtggaggtaatagaatcatgagggtggtttcccccatgctattctcatgatagtgagttctcacaagatctgatggttttataagaggctcatccccctttgcttggcactgattccttcctgctgccttgtggagaaggtatcttgcttccccttcaccttctgccatgactgtacatttcctgaggcctccccaaccgtgctgaactgtgagtcaattaaacctctattcctttataaattacccagtttcaggcagttctttatagtggtatgaaaacagactaatgtagatgatatgctcaatttcaaacatgcctgattaatgtctcactaagactcactaagtctcactaaaacaaactaagactcattaagacaaaaaaagatcaagagtcagtggtaaatgtggaactgaagttagggaatgataacttgttatgcatgattttaatcagtcattctctaatgcgcaatttaaaattctacaaagacataatttcccaaatactcacccttaattgttacaaatcgacatagaaaataaatcgaggtttcaactgctaatctgagaaatcaaaggtgaactttgggcagtgcaattttcaaggcagtgaggacagcctagaacacagtgagcatttctctttttttctcaaaatctccacctcatatttcaggttaccactcctggaccctattggagttgctgcaggtacatccgttaaccttaaatcacctgaaatatgaaatgtctttatttataccttatattaacaatataacattgtatcctttaaactatttgaacagttgcaaaaatggttcaccctctgccactacccacttagacatttacaacaatgaatattttcctcaagaaacacattttagttaagaagctaaagatatccaaatcaagagattttatatactattatattatctcatattatattatctaatctcatatctctaatatcatgtaataaataattttagtccattgaaattgggcatattatctttcctcactttattttcttgtcttgctgctaatggtagcaccagtccctctcttcagtacttcctgtgcaccaaataatcctacccacttttactaatcttactctggtcttttctcactttctttcttctctctagttgctctcgtctacctctcttgctttctggaaagtaagactcccaagtctatacttcaagtgtgtaactagcttcagagatcaatgacctgtggttctagcttactaggtactgctactatgtcattgtcccaaactgaggtcattatcctcatcaatattttgtaatacaaactacacaaattcaaacaaaacgcacatatcaaattttgttttcctctgttttaaattctctaaatccatttaggttatgatctccactcctcaggactctttcttatcctacattcttcacaataaaactagtcattaagatgtgcaatctgtatccgatgtatatcttcaacctagcccttcctccgtgccactggttgaatttattcattaccatttcctacctacactaagctttttactccctttaatatacctccccccacgaacaattttcacattaatttttgaataatttttaagcaaatgtaactacagaaatcacctacctacctggtttaaagtattacgtggcctttactaactacagaacaacactcaaacttccccagatagtacgaacagaacttcataatttggttactgcaactgaactggaccgtctgtgattcttggaacatcccatgctactttgtacttctgtgtcttgttgaacgtggaattctgtctgcctgagttcccatatggtaaaactcactccccatggccccaccaccacacacatacacatgcacacacaccatatagatatgggtatcagtaactacgtaataatatactttttaaaaatattgttttcatttcaagaacatcattaaatcataccaggcagagctagttatgctattagtcataagaaaaacagtttaagcaatggttaagagtgaaaacttcagaatcatcctgcccagggatgcatccaaactctgtcatttaccagatgtgcaattatggacccattgtccatactttagtttcttcctctgtgaaataaagataataatatcagtacctttcataagactttgtaaagattaaaggaacctggtgtggtacaagataatcatcagtgtaaatgttgacattattgttgccctatgtttggcctttccatgataagtttgacaattagtcttttttattgtgtacttcttgatacccatatctataatagttccctgctagaatataactcaatgaagacaggcaccatatcttattcattttcatagactgtttaacccagtattgtgaatgctaaatcaggactaggaaatgtgacagatgacatctgcttggctccagcaagttgacatcagggaaaccatcctcctccccagccatcaagtcagtctgtccccatgtaacatcttaacctaattctcctaaaatattacctctagtttcacccaaagcagccaaactacccatgagtttctctgtcctgagtgaaagatggaattttggaaggcttggactatgcattgtgttgttggcaacaaggagatagaaattttacattcagaaattaaagaaataggaggattatagctaattgatcttatttatttgatacttctttatagaaattatgtttaaactgttttgcttatctttggtttcattacctttatatggtaacattcccagtagtaggacaccagtagaacaaccatttctatgcatgtgagatgtcacacaaatatatactgtttcttgagttaacattgggacatgccttttagaggtgtggaagctgatttaaacaacttactcaacataccaaggagcctaacataagtgtccataataaagtatattattcctcattcgcattgctctatgcaatttagccgtcaaatataactcagagataagtaacctaacagaaagataaatattactgtagagaagagcctggtcccattttacatagaacacagggtatccaaagatgtagttgcagcttactccaatccagttattattgttcaacgttgcttaatgctgattcacttgaggtcaataagcttaacaatttttttcaactttctatctatagtacagtctaaaattagaaaaaagaaaatgctcacgtcatattaggaacaatggacatatatacaattgtaataggagatagaatacaaaactattgcgattaaaccacaaagtactataagatatatgtatatattaacttttatatgtataaaatgtttctgaaggagtacacaagaaagcatgatggtgattctctgggaagggccaacacagtagtgggaaatagggtgagacggaaacttatctttcaccgtttacgtttttatttatttttttttcaaaaagaaaaataaagcaaattatttccataggaccgtggaggagaggcagttgtgttctgatgaggaattgggaaggcttcttgctagtgcagtgacatgagcttttcctcttggagaggtgccacatcctagctaaatgacatattttgtgatcctatggaatcctgtaacagtaaactaagccatagggcttttttagtatcttaagcaagtatgtgtctgagttgtagctagtaggttaaattgtgtaaagagttaaacggtctgtatctcataaccttcacattaatacagaaacatgacactgaaataaaggcccccgaagttagcttgattgttagctaaggaagaacaaacagttcataactacaccatggtgaatctgtgctgtttgcatttaggcagtagaaaatgtcagttctgtcatctgcctgaatctatccaagttatcacttaaaaattagatcaatatcacttttctctaggactctgaagggtagagagaagaagcatctgtgtcacaacagaaaagtaaaaatcgtagtactttttactgtaggctaacttacaagaataaaaatgtccattctcttagagctatgtggtaaaactctaatttgtttttactattgccctattgctcttttagcaatccaatatgaaattccatccctttgaaagatgagcaggggaggtgggaaatattccctcccatattcaaaatctcatctttcctgtgcccttttcattgggagttgctgtataaaagcctcttggattgtttttatttgaataaaatatattcttgggggagacgtgaaaaagaatgttttctatagcattggtttgctggctgctttatgtgggcatttggtattaagcaatatggaaaccttatcttattacactaggaaaggaatctaatgtgaaggatacgttggtattacaataaaaatgaccaataccttattaatcttgtactattgttttaccctgaggatagtatttatggttccagccctaacaatattgcctgtggacatgaaacacaagccagtgctgtttatttcaatatgtaaataggatttgctttttgtacagtaaaaaaaattaaaccctggggttattgatatattaatgttatttttattgtcagtgaaataagattttaccatattactactgaccgccaaatcccctgaagatgacttttctgcaggcaaaataatgtcctattagtgacctagatttgcattttctggatttctggaggacggttgcctttaatgccaaagaaccaagtgattctttgcatttcttgaaaatactaagtgtttcaaaggctagcttagacttccgtggatcacacttagttaacgtctcttagccactttgcatttaatattttgttcatgtgaaagaaaccccagaagtaactagctcatgtgcttcagcaaggtgtctcaatcttcatgctactaccgttcaggactcgataatgtttgtataggagctgttctatgcattgtagcatgtttagcagcatcccaggcctttatccactagatgccggtagctcccccctctcctccagttgcgataacaaaaaatgtctccagacattgccaaatgtctgctggagagcaaaatcacctgtggcttagaaccactgggttcagtgtaaaagaggcacttggtatatacataatgctgtgaatcttggtgaagaagtaaacttttttaacaggaaaataacttgttaagcaactcattcccattttctgtaacaacatttgcaaggcataatgcataatgcatatattaccaaatacaaaaaacataaattcatatgtttagaattaccttattttgttattctgcctagaaagttccccagtagcatgacatctctgcttgaagtatgtatgtatgtatgtatgtatgtatgtatgtatgtatgtatttatttatttatttatttatttttaatgtgatgcctgtgtgaaaatgttttcaaaccctgaccatggcagggactgaaaaaaagctaagagatttggaaacacattctgcagttccctccttggagtctggccttgtgtattttctttagataggtacctctaagcctcagatgcaacagtagcctctcctgtcatggtttaagcaggggtttcctgtaaattcatctggtgtatgtttggacttgagaagagcttatttcagaataccagaattaggagatcaagacggtatgccgattctgttcttcccagaacattttcagttctaaatgactctctgacttgagtggcagtattggaatttgctgggaagtatgaaatgtaattcttgtttgatggataggattagagcagataggacaaaaatgcattaaattttcccccaagggttccttttgctagtatccgtttacttggctgctttctttatgtttctgttctctgttttccccatagaatttcctgtaaactttgcctgtcaatccaatctttattgctttcatttttaatactccaattggcgcattttacaaagtcgaccagccacgctaaaatgtaatgtgtggtttgctttgtctgtataagaggctgaacctggatttctaccagaagttaaaccactgcatggcatatgaggaagactgtttattgagtggccttgggtgcctcacgtgtcattatgagccccaaatactgttcactgccttacaaataagatctgtcaaatataagacctagaaggaattttcaaatgcaaaccttgatttttcatagaaaaggactgtcttttttctagtttctaatgcccctgcatgcttagaaatttggtatattatttaagcttccacttagcatttaatatgtgatattggaccatcttctctgggctctcattcctcagcttcctacctctttcagggacccttctcctatggtcctgccaccctggtattgatcttcctgtatggtaatcactactgaattccataagctgctctgcatttattcattcattcattcaacatagagttatcaagtatctactatctcccaggctctgttctaggcaacaatactgatatacactcaacccccttggagctgacattctagaatgagaaatgtcaataaatacattgtattcgtcagttcaggctgccataacaaagtggcttgattgatttggtggcttaaacacaaaaatttatctttcctcagttctgaatggtagaaattcaagatcaatgtagccgattctggtaaaggctctcttcccctgattgtagatggctgccatctttttcatttgtttgtttgtttgtttgttttttgagaaaaggtctcactcttgcccaggctggagtgcagtagcacattcatggctcactgtagcctcaatctcctggacttaaatgatcttcccacttcacctcccaagtagaagggaatacagacatgcaccaccatgcccagctaatttttgtatttttgtagagatggggtctcaccatgttgttcagactggtctcaaactcctggggctaccatcttgttatgtccttatatggcctttcctcagtgtgtgcgtgtgagagagcctgagtgagctgtctgaagtatcttcttaaaagaacactaatcctatttcattaaggccccacgcttatgtcctcatttaaccccaattacttccttagacaccccatctccaaagacaaccacagtaggggttagagcttcagcaggtaaatttagggggtcacaaacattcagtccataacatataaaaataattttttaaattaccacttcagatagtgataagagaactatacaaatatatcaagagaaaaggatagaaaacaattgggacagacatggcagttgctaatttagctacaatcctctctgaaaaagggacagttgagtgagaccagaaatgaagaagagacagccttattaaactttggagaagtgagcattttaggtagagagaatttcaagttcagtgtagagatgagagtgagaatgatgagatcaggacagaagaaagtcagtttggttcaatcctagtcagctatggagaaagggttaagaaaacagtatcacagaagtaggcaatagcctgattgtgctagccagtgcaaagagtgaacatttgttcacattgcaatggaaagcctatggagagctttaggctgattaatacacaaatacagtacaatttaagtgactaaatagagaaactcaaaggggtattttagagtgttattcgtctttgttagacaaagtaaatgttcaataattttttaaaatggaaagatgaatgttttcttacatagtaattatcttttttaaaaaaatcagatttattagatgtaatttacatacagtatattcactctctttagtgtacagttctatgattctgacaaacacatacaatcatgtaaccaccaccacaatcaagatgtagaacaggtatctcccctcctcaaattccctcgtgctcatttggaatcaaccccttcctccaccccgctatagttttgccttttccctagtgtgatataaatgaaattatatagtacatacccttttgagtctgacgtcttccatttagcaaaatttacttgagattcatcatgttgaatgtttcagtagttattttctttttattgctaagttgtgttccattgtattgatgtgccacagtttattaattcagaggaaggacatttgggttgtttccagtttggggcaagcatgaataaagtctgtataaacatttggattaaagtttttccataaacaaaagtttttatttaattttggttagtatggagcattgctgggccatagggaaagtgtatgtttaactttaaaagaaactgcaaagctgttttccaaaatgggtgtaatgttttgctttcccactaacattgaatgagaattccactttctctgcatccttgtcagctgttagtattgtctttaaaaaaaaaaacaactttgtattttctctttttgtcattatatcaggtgtatagtcagtggcttcttttaaacgtcacaactataaatttaagggtctggtgagtatggatagtaagaatgtaatgtatgatgggataatttttttcatccacactatttttttttacccaaaagagtatgatcttatcaaatcattgttaagagttaaagtacatttaagactataatttaagtacatttaagactatatttttgcttgaagacttttacagaaaataagcttaaagaatttattccttgaatcctgacaaccttgaattctagtcctcccatatttaatgggagtctcatgggatgctttcttagaaagacaactcatgaaaatctctatttaaaatatcactgacccctgaggttggatgaagtctttgtcccataaattccaagctcagtcatactattaaaaaaaaaacaaaacatagtaattgagttttgctaaaaatccaataaagcaaaagaattataccattatttctcacatgcatttttccaacctatcctcacatcgctgacatactccatctcaggcaacctggttttgtctgttctgtggctcgccactctaaccttttgcttaccagtaagacataggggaaacacaatttaaattctgctgaaggatttgagcattcagtaactcatcgactctacagtatagtctgagcagaaatggacatttcactgattttcacatccagaagctaccctttaatagatctccaggagaatcatccctcctctgatttgtgaattcctgatcttgtagcattctacagttgttcaatgagaggctctggaggactagaaaattcagtgctttttacagagtctataggagcctatcacataggttcagtgtctctgccagtgccttgacttaatccagaaaacattcccattccaacctcgatacaaattgtcctgttgcttctcttttcatggagaaagtattttctgcatgagggcatggacctatgcctaacacaaaatatccataactttctaggaactggtctttatttcctgacagaagacatagatgcaattcctgtatttgtaacatcagtcacttttgtaaagcttggtgctttcattttgtctttctttcaaagccttttaaacaacactcatggcttttctcctcctgctagtgggaggcagtattaaacttatctggcataagaaagattttgtgcagctaattttatcagatgactccaagtcatttcattcggagctacttatttctcttagtggaatcaaataatgtaaatctcctagacgttcttgttaatggttggtggaaaaacgtgcgggtggaaatatgtctttcccataggtacttgatagcatttgattagaggccaggcatgtagcagcttcgtgaatcttcctttttgttttctgtttgcagattttattcttcaccgtacagtattgcaaccaaccgcatgattccacagacatctatcacgccattcattgctgcttcccctgtctccacataccaggtatgtccaatttacctgcaccttaggagatatctttcttgcagtaatacagtatttagaggcaaaaaggacacagtagaatgaaaagaaaaaaattctcatacactttaatcacatcttaatgtaataatactcaagttatgagttagcctatactttcaagagcctgtttgcatcaattcactggataataaaatccactatgcttttcattcttcctgctgagttttcatgattatgctactgtccaaccaaccttaatacagctctctcaccactgggaaattattttgtttgttgtctgttactttgtttgttcatgttccctattgtgtcttttctaaaagcacatttctagcaattccttcactcactccaggatattttatcactgtcatctcattttgtcatggttgtcctggtaaagctacacagatagatgttaaatcatacttcccaagaaacagaagaaattatcaaagtggtaaaaagttgttcgtattccctgctcttatttcattctcagttccagagagaccaaaagagacctcaggggttccgcatgttggaatgctggaaagtctgagactcaatgtgtgtcctcaactagatattatagccagttaattccaagtacataggtcgattaaaatagtcacacttctccctcaaacaatactccttgttttattcctctgagttattacgtatgtgatattaatctcctctctacctaatattgttcttcaaacagttcttccaattctaattagaaaacgcctatatatatgctgcacgtagaaagtgtctagtgtcatttcttaaaagtttggagggagaaagagaaagagagaatgcaagcgtgtgtatgcatgtgcttcttgaattttgcagctggtgggggtggatgttatataatgagtaaaactgtaatgatactgatactattaattcagtgaagttttgccttgttcagtcactatatacttcatttcaggatatcccagctgtcagagaatcaaacttaagactatgtgcacttttccttaactgattccccccaaagcagatcattttctttctttttctgcactcagattcttgaaacatatccgtgggcaaatggaatagattttcatttgaattacattagagggtctctgaatggctgatttcttaattgcctttccttggcatgaggctatgtgcaggttctgttcagtttttgttcttcctgcaggcctgcctggttgtaatgtgcgtgtgtgtgtgtgtgtgtgtgtgtgtgtgtgtttcctttttttttctaatcttggcctctgttccagccaagaccacccattaagccacagtgtagagcactttggtgacatgaataaaatattcactgaagagtgattttacttgggagggctcataagtggaatttaactctagctcccttttctcaaaagaagagattacagcaatgatcgatgttgttgattctcacctttcaccaggttttttcaatccaaagtgttttggcaattctgtgtgtgtgagtatataaaaaaaatcttctgagttctccacgtgacattcagcttatacaggctgactttttcatttgtctgacacatggtacatttaagaatagttggctggctgacatactcatttttatgtgttataccaattaccatgagcgaaaataattacaaacttgcttaacttgggttaaacctaaataactgccccaaatttttggtttatctctttagctcttaccacaacttttaccacttggacatatttctaaaatgggatcacttgagcatttgaagttacaactgatgacagaaaaagagaaagtcttagcagtcaactcttgcttccttcattacttgccaggacatccctgaaagctgatcttcaaatggtctctgaggcctcctaaaactttagcgttcaacatcaacctcaaaatatgctccaagacccagcctgggccatgtgggcactgaagtcagctccactgataggggaagttgctttaccttttaccttgtttcagggaccaatttaatcaagtccaagaattccctttttacccttggttttgagcacgaattaactgtaaagtcaggtggactccactttcttatgacctagtgtgactccactgaacacaagaaccaagttctctctatgattgctttgtgctaataaatgctgtttgatgcataggtccagagtacttcatggatgcctcatccgccatacgttatgcaaccaacagtaagtgttctcagtcacctgaggctaatatttctattatccaagtacaagcttttggaatgcatagaagctttggggtaaagcttttgttataatatgtaactcgttcaggcagccatattctccagataaaaagctgttcctgaaattctacaaaagcatgtacaatagatagctagagatcaacatagacatagaatcagataaagagagagggtgaaaaagcaagagagtgagagagagagagagagtgcctggaaactttattagaagaaatagcaatcaaccattcaagctgagtctaccatttcttatgcatgaggaatttctgctttatgcaggaactcagaactccggacaattaaatttattctacaaggaaactctttgtttcccttctctttctgatatgcttttctttctttggccacagtctgatatgccttagggacaatttggagtatcatagacaagttttgacttgaagcaatatatttcaaatatgaaggtagttgtctgctaatagatgaatttatatagatagatggcaaggtgtgtaaatattttcatgttaattaactatagcagttttctttttctatagtggaaattttctctctgcaaaatattcaaattctcttttttacttgctagatttcccattttatggcacaatattacatcaattccaagtgaaaagtatgacgtattacattagaatctagactgaaggctaatgattgcatttatctttgcctaagtcttccagggtttctagctctatagaagtgcgagatagagatttcaatagcaacacactcatgagggtgtgaggcaggggaaagagccctagactggaagttgtgtgacaaggtctctggtgactcttctgggtatgctctctgtgcatttgtttccttttctgacactatatacttaatagtgcttttgtgaggatcaaatgagagatcacatgtaaaagacaatgtaaaaaagtatacatgctatgcattattattatcattgtcctcattattattgaatgtgttcattatacaaggaagaagcagtgctaaattttaacccctttagaagataaatgtaagtaagttagtatacattaaacaccagggagctaaatacgcagacatccatttcctgaactcagaaaattagagaatctggctttcatatctgagcagggtccattttatttttttaaataaggaacttttcatgttgctccaaacattttgatagttttttatttaaagaataaaatatatgtagtttaccacagcagaactttgtaccatattttgcaaatccctttatttactattatttacacaccttgagggctttctgagttcatctagtctatgttctataaatcataccactatgcaacaaatccaggctacacttttctgtccaagtcataaggtaaaattcagtttgtgctgccaaagcaatacatagcatagcaaagactgagccaacggaggaaaaggaaagaagtcctgccaagttctcaaaaggagactttctggaaggaaacaaccaccttctaaaaaatgtgttcatccgtaaagcactaatactaacttagtcctcatactgagttttaacaccatctctttgtggccaaaaggagtgcacatctggcaaaatctgaatattttaccagatgtcaaactatgtaagattcttcagtacttccagatctattaggggcagggaagatggttgtatgggactttatttcagctgtcactcaggacttttacaaagcttttcacacacctccttttccaccccagtacagcttcagcctcgtgttcgcatgtattatttctgtgtgtgtattattagtgtgtgtgtacatgtgtgtgtgtactttaatttgtccttttagattttccttgctgtggctactactcagagctgatatcgtatcacctcccatgactaaattatgcatcgtgcttgagcttaggccactaggtttaaatgtaatgtttatggctggggtggattcctggaaaaatagaagtggctgggccacacaccactttgctatcttttagatggagaaaagggcaaaacagtatcatggaaacacagagtttgtaccatcaatcatttccctgtaataatcttgttggctgtccatattacataagtaactttacccaactggctttaattttatcatcaaagtgaggttaagtcaccctatgatactaaaatataaaaatattcaagccatcttagacaacaaatcaaaaaacctgaatctgagaagaattaatgaggaacttgatgattaacaacatggattcttggttgagctcattaggacaggaaacccattttagcaagggggtattgagctatttacataaactttctgagccacagtttctcatctgtaacatggacataataatacccaaataattatgttttgttcattaaatgaaataaggcattaaagctcttaaaataatttctggaaaagagcactcaataaattattattatttaattatattagtagacttctcattatgctttaaattatcccagttttatcaaatgagtgttgttataagcagaaagttgaaagtaagcaactttgttgagaatcatctatttctaccacattcatagtgctaattaccttactttgctaatgagtttggtggagaaactctgtggctataaacaagacaaattgcttacattggtacttatttcacttactttctaaacattcaacacctaaaacttaaaaaaaaatgcccattgagaatctccttttttcagtaactggagactaccttacaaataaattcaaggtgtcaaaatctatgtctcaaatatattgcccataattccaatttgcttgcaacttttcttctctgtcacattttctctttcctcactttatgataatttcatgcatgaggtttcattgtacaggaatatacctcccctatcaccaagcgtgtacactgattcctgagttggagccagatgtattgcctaggctagaagcccttcgggttctctctcaggcttgacttaaagggctctaatgtctcaatctggtttgtatctgaaaacagtgcttccgtaaagttctaaagtagagcgcaatgaccttgatctctttgctaaggaggatgaatgggtaaactggaggggcaacaactggtaagagagaaatgaaatggcacagagaactaaagggaacagtaaaggcatgaaagaagaatagaaaacataagcatataatttctaaagtttgccatttaagtttgtttctttgtacatttaattttctaagtaatgtgcttgtagatttagaaaaaaaatactctgggaagaaaggatagatgtctctttgcatggattataattctgatgttttggaaagaaaagagatttctgttactggaccctgggaacttattggatctcctggaaagctgtcaaaccccacgtagagaatcaagagcatttctgtttgccttttgttattgttcacctgaatagactctgagaagacagcactgttagactaaattaggaattcccttttttctgagaagtaaaaatgctgactttgtcaatgtagttggttatttgcttctgcttctcagcacagacgtctatactgcatgctgaaatctcaccattgcactaacagaattttaatagttgatggattgcaccaaatacctactctacagagcagtatgttacattgcaatgtcatatgaatacacagttgaaattgctgtgttccaatacattggatattttgttacatctgttattactgacaaggagaaaagatgataattttcaagaggaagcagagttccactttcttaaactttatttaagctcatttgaagcataaatcttctgttcttgatatgggtagtgttatatcatctcaaggagaaaggtcagctttcattttgacttaattacaaattggttatctaattacagtattctaagaaatgcaagatgcccttattgaatcaatacatgatttgttgccatggcaacaaatggcaaaaaagttgcaagcaaataaaaaattataatcgttatgattaatgaaccctgagttttcagctaaagagaaaatataaacttcttctttacaaccaggctgtttaagaagccccagaatacttaatttggtcattctttgcccttaaacatgtaaggcctaaggcctagttttagagttgtgtccttcaattttgtaggtgtgtgttttgagaaggcattatcaccaaatttgccctaattactgtagaaaatagtcctggctttgctaccgttaaatataacttcaaaattttacggtaatttttcaaatataatctcagcaactttagtaaaataactttaaacaatgaaatgcaaggcttataattcaaaagaagtgtatagagtataaaagattttccacctaggatcccttcattcatcatttctattctccggaaatacacattgtaaacaaaatcagatatttctatccagtcaattttatatgcatatgaaattatatatttgcatgtgtgtaaatgtgtatttttaatatagaaacaatattactctacaaatgttgtattatgatttgctttatttttcctcaataataaaatgttctggatgtcaataaatatgagccatatatagatctatatcaattttgctaacagctccattgtcactactgtataaatgcaccaaaaggtgtactttcttgaaaactcaagacagtaatattacaccctagtgagaaaacgtctgtcagataagttgctgacacaaaagatatttacattttaaaatttgatatacattattttcaaattgccttttagatagcagtttttctttctccataacctcaattaaaagcaggtaatctcaagttttaaatattttgttaatgtggtaaatgtctcactcatattttattttcatttctgaatcctatgagttgagttgattttcacgtgtttattgactaattttgttttctttatctctgaacttcaagttggtttgctttgcttagttttcttttgaggtactgatcttttcttatttataaaagatcttattacagttagtaagtttatagtgtcatagataatttaaatattatctcagttgactttaaattttaattgtatatttgtcatgcagatttttggtatttatgtattcaaatgtatcagtctttcttttagaacaagggtcagcaaactttttccgtaaaaagccaaacagtaaatattttctgttttgtgagctatatggtctgtgtcacacctactcaattctatggtttattgtgaaagcatccatagacaatacataatgaatgggtgtgccttgagttccaataaaactatatttacagaaataggtatggccacatttgactcacagcctatattttgacaaccccagctttagagcatctgtattccatgcaaaataccttaatcactatagatttaaaatgccatatgttttcttactatgcttatagtaaattttgtttaaaaatgttgttacctttgaagtttattttatagcatgagatgagattaagattcaaaatttcatttttttgattttttttcccccaaacatggaaccaattgccataacaaattttaccaaagaaaccctctatatttcgtcctctggcataaattttatgccaatatttatcacataataaaatctttttatctttgtatctgttttccaaatgctcttctgtcctgcttctctatttcctttgagcattgctctattttgactactataactgacaataccttaatcagaggtgtccaatattttggcttccctgggccacattggaagaaaaattgtcttaggccacacataacatacactaaaactaatgatagctgatgagctaaaataaataaataagtcttataatattttaagaaagatcgtgaatttgtgtggggtcacattcaaagccgttgtgggctgcatgcagccagtgggccacatgttggggaaacttgccttataaactgataggaaatgtccacaatatttttttcattgtttctcaaaaatttttctagctattttacattttcagatgaactttaatgcattttatgaagttaaaaatgtactaaaatttcaaattatatattgacttatgggaaatttaagaatatgacatatttacaacattgaatttttctatacaagaaaaagaacttttcgtctacccaagaattcttttatgtattttggatcacttaatagagtatcaggtttccgccatatgtattctatacattgcttaatgttttcctggcatcttagtatttttgttattatatgttttagttttttgctgtggctataacaaagtagcacagactgtgtaatttataaagaaaataagtctatatagctcacaattctggaggatggaaagtccaagagcttgatacaggcagctggtgagggccatcttgttatgtcataacatggcagaagacatcacctggcaagaaggcaaaaacaagagagccagagagagcttccttttctaacaaagctattcccacaaatctaattccatggcaacattaatccattcatgaggacacagctgacattaatccattcatgaggacacaacacttatttctaatgtgtaagttttgtaacacatgaaataaatattcttcggcattgcaattataaaaattttattatattttctcattgatcactttggtgtataaaaatgtatatactaattttattcatttaattttaaaaatctattaattgttcaaaagtattgctgaaatttagaatatatacataagttaaaatatgcatataaaatacccatttcctcttacccaaagattagtacagttaatatctaatgttacatgtttccagatgtttttctgtatttatatcaatatctaccaacttatctacatctacaaacatgcatgcatacaatatacccattatatatatcatatgtatgtgtatataccatttaccaaaatgatatcagtcaaatgacatcacacaatatgtgctattttcagtgaatattttccatttttcccagttgagaaattttttatcatctctcatcaaattttcccaattgagcaaaaatgttatttacactggtttacccaatccaggaagcaatcagtgaccacatattatatttggttattgggtcatttaaggctcttttaatctggcagtcttttttcccttcctgttcatggttagctgtcctgccatgtatcccactcttgcaaaatgtttggttgattcttcatgatgctgtttagccttttcttctatctcatatatgaaacaatttttgtaaccagctatctttctgaattccctcattgttttcaatcgaatatttaattcattctcagcttttccaggtcatcaaaaataatataattttccacctgattttaaatctttatatttcataattcattttctggccaaatggctttggaatgtatcctttgacttatttcttatcataatggatatgccactatgaattattttttaatttaggtgtagatgttgaacttaatcaaagtttttttgaaactattgatattattttccttttgccaattttattgtattaatatatttgtaattaattgtatcataatttttaatattttcctaaggtagaatcattctgccatcaactccatttggttatgatatatccctgttaaaaatatacttccggattatacttgtgaatagtttattatcttggcatcagtttttattaataaaattagtaagctatttttgtcaggtttgaatattcaattaacaaaggctttataaagttaatttggaataattcctttttctctaattgcagaaacaattttaaatagcattaaaaaaatctctttttggagattataaaatcttcatacccaagactatcttagttttggggaagagatgcatttattttaccaaatccagtttaaaaaataatctattactccagtcagacatgttctcaggaggctaaaactttataatctatttaagaatttgttaaggttggcccggtgtggtgactcaagcctgtaaccccagcacttggagaggccaaggcaggcagattgcttgaactcgggagtttgagaccagcctggggcaacatggcaaaaccttgtccctacaaaaaatacaaaaaaattagccaggcatggtggtgcatgcctatagtcccagctacttgggaagctgaggtgggaggattgtttgaggatagaagctcaaggctacagtaagccaagatcacaccactgtactccagcctgagcaacaaaacaagaccttgtctcaaaaaaaaaaacaaacaaacagaatttgttaataccatgtatgatcatgatcatgaagaactctgactgttgcatagttgatagtcatgttgctgaatgatcaaatcaattggattgtgaaatgccacggtcttaacaaaattagcattatcttttgctccatgactagttgttgataattagatcataggccatatagttcttaagttaaatgtagtacaaagtaaaaataatcagttgccaactgcctaataaggaatttttaggtatgagcaagttgtaaatcaataatttgtaatttttaagaatgtatagagtttttaatgcccttgattgtcataaaacttgaggaatattttcctcacatgctcgcttgattcagtctttctttcccttagcccttagctataccaatcattgactcctcgtcttataacattgagaaacttgggttcaatgaaaaaaatcaacaaataataaaaacaaatattcttgagcatcaaatatgtgcatgatatttttctagatattattggaaatggaggagagaaaataagaaataatttgtcctcaagacttgaaatataattgtagaaaaacattatatgctcaggataatttaattgaaaaggtacagttgaaaatttgtcaaaattttagtaattatataacctaaaaaataaagaagcctctgtgaacagttaaggacagagaagaacaatgacataaagatgaccttaaaggatgggtgatgtttgtggggctaaaatgaaaaaagagaacattttaagtgaaaataatacacaaaaagtatgggaggagagtctcaagttatttcaaaggggactacggggggagcaaatagcctgccttaagtgaaatgtttatattagagaacgagggaaatatttggttggaaagttaaattgctacgtattgaagtacaactttcacgcagtcaaatctggcagactttcctacacattttttattagcttgacaatcccagtactattgttcagaatttaagtttactttgaaaaatgtaaaacagaaagagtaagttatgtcactgatgtgtgcgtaaaagtaataatatgcagtggagtaatgtatgaatcaattataaatagaaaaaaataaattctgctacattatgaaatgccattgtgcaaagtctttgtatataaagtcattttatattcctaaataattttggaggtaatgtttatcttccaagtagagttcctgaaggcttcctgctgtctgagatccctgcctcctaagcacaggagtgtctaggggcagtggtgagtctagaatcttttgaaatacaaaaaatatgctttaatacattttttaaattctcagataatggtggttggaagctgccaagtgctaggcaccaacacatctccagagtacatagggatgcatctattaatagatggccactgtttctatacccagtaacgtaaaaattgtcccaactgaagtattctagctctgttactgtgggagtatgcggggcatgtgtgtggtatgtgtgcatgtggcctacctttctgcatgtggttttctgttattttactaacaacctttaaaatgaaagactagctcaagacataatgtatcactttttagaacagcaggcacagcattctggacatgacacaattgacagctgctaagaagaaaaatttcaatcatacatgatctccagtgtgtccttggatagtatttagaatttcttcattacttcatcattagtaaagcagagtatcacagctttgccagttccttcataaagatgtagatgatgttacttccttaatagctatttaacatattaaatataattcaaatagaaataatgttaaatatccaatctattaaattcttatttcctaaagaaagaaaatatgcagctaaaataaagtccttgtcagactttctagaaaacagcaagttaccagggcgacaatcatatagaggtagggtagatcatttactttataaatgttaccagggtaacagaaactactcgtggaaatcactgaaggatttaggatgagagtacagatagaccatggaactatttgttctttcatagcacattggaacaaaatgtccaaacatatttaaaacttttaacacttatgtgaagtatttgggtattcattaaatagatgatcagaaacgggttcacatattgagagtattctcaaatgtgaagagtacatctcaaatgtaaatcaaaagatattatttttgatttcttactgctcagtatgtcattgggatactttattttactctgaattttgactttgctagattagttctagagaacctagttatttctacctaggtgctatgtctgcaatttaggatcatggttaatggtgttgattagcatgaggcttgagttttataggtcaaccaattagggtgtaggagggagggaagtggttaatggagagaaagggaaaaactatacatatacatatatatgtatacgtatatgtatataattttcatgtgtgtgtttgtgtatggcgtgtacggattaatcaggtttgcttaaagaattatggagtttagagttagatttttcaaaatgataacacaaatacaagtaaaatgcctttaaacttttctactgcctaagaagaagcttaccaaagataggaattaaacgtacatttttctccctgttttagaacaattggtttccctcccaataagactctgtcagaaaacaaataattctaatatgttcatctatggttaacagttaaggtatgtgcaaagtctataagcagtaaagaggaggaagttactcactgtggagggagtagaggaataagaacaaggcttcacagaggaggtaactcctgaacttggttttgaaaactaaaaggagttttttagaccaacaagtgttgggtgtcaggcaggaagggtgctctgagcaaagtgatcagtagattgtaggcagggttttggtcctattcaccatgtgctgcagctggtgaacatctaagagaaagcaaggtatttttacaggctaccaggtgcctctaacactggggcatatgcatgacatttgtgtgcccttcaacagttctgccacagaaggtatcacttaatcatgattagggctgttgtcctatattccattaaacatggcatcttctcctagagttccgtttgcatttctaggcaaagcctcctcaccaatatccgatgtgccctttcacaagttctccactcagagttgagtgtaatatgcagagaatgttattgatattacttgggtatcataaagtaatcattatagcctctgcacaaggctaattagtcctaattatctgaataccccaggtgaaagtgagatttctactcccctcagaaccccaagaatgcgtagtgtctcatcatttgactgtcaacaaatgcttcgttgctaagttattcaaacaataaagtaagatgatagagattctaagaaaaaataccagaacttatatgtctacatgagtttcttttttctatgtgatgaaattactttgggaggccttttccattgatgccatcttagactaggacattttaaaaatttattctttgggaataattttcagagataatttattaatcatacaagtaaaacaagttcatcaggttatattcacatgatagaaaaatggagaaacacatacataatagctagatagatagatagatagataaatagatgatagaatgggtggatagatgatgaatgaatggatggagggaaggatggatgcagggatgcggatggatgaatggatggatgggtggtcagacagacagaatataggtaatagatatcctgggacatgacactagttcttctttcccaactacagtataattttattatttgagagtttattccatatagttcgcaatatttctcccgttctattttgttctaaataaatatttgataataagttacactttatagactatttctgcattggcaaatattaagacacaagcttccaggtgccgttagacaaggatactgacaaaggtttctgagaaaattaaagacgtgcatcttctctgaaatcaaacccaacttattagggaaaatgatgctaatattaaatttgtctttgtaagtttgatcattaaatattgtcattgtcagtaaggaggtgtgttaaaaacaatttaggaaaatttctcttatgttcataatgtagtattctaattccttttcagttgcagatttgtttatatcagctgaaacaactgtgttattcagcgtagtgtcttaattggcagttacatctgtagagagaaacattttcttgtggacatttcttttattaactctcaataaaagccaagcacatgttaactttcaattttctgaagaaatgtatagggcaactacattaatattcttcaggtatgtaagtttcttataacctatcttgatataagaatgactcagtaaatccaattggctgacatgtggcttatttggtgtttatttagtctgagccaggatgttattaaatttataccatctgatttatagtttcacctaggtacaggctattttacctctcatggaaaagatggcaagattgttcagtttgtgccagaattttccttaataaatgtcttcaaagctctcacaggagcccaagcatgtacacagttgggatctagtagttctgtgctgttgagtgcttgagaggcaaatttcatctaaaatattgagggcaggcataagacctcttggctatcatcactaggtggctcataaagtactcatgattttaacagtactagactctgatgcacttgccaagatgaatcaggtgtaaaatgtactccgtggcagcaaacggaactgatagaatagaactatttgatgtggaccatgagaatttaaaagtatctgcataaattgatgatttggcatcagataaagctgatatcaaaccattctatcttacaataattactcaatatgttcagcagactctgaaatctgcacttgagaaatgacagaaaaactatatcatcagcagagaaaacatcttcttgctgacctaggaaggcatacaaatagttcagttggcgtcacactgtttatgcataatattttacaaattagggtggtacttgttcccttttatatcacttaacataagtataatttcattgcacataactgaggagaaatagtagaaacaagctgagaaaactgaaagcaaattccaagaaagaggattagtcctcatctatgttaaaaagaacattgtgctcttggctttattttcttatttagcatagagaaaatcaagctaattatcaacttgggttctgaataataaccttaaaacttctattgagaagagaaaccttttatcaaagagttattcttaaacggttcttaatcaatacacattagaaccatttctgcataacaatgttgtatattaaaaatcaattcttactttccgataaaggcttttatcttgtcttgtatctctaagtattttcaatcaatactgaaaaaatcattatgcttccaagtttgtgttacatgatacatgtctaaatactcagattctgatatcacactccaaaataatctaactttctgagatgcatatatgaaatttatttcaaggaagtgtttatattatacatggcatgaactgatgaatgattgatggatactacatacacattactgtccatatatgctgaaagctgacctccattatagatattatttaaccaaaagactgacatatacatataatacaaatgtgtgtttatatgaggttattcagagttacatttaaagactgaacactgttgagatttgtggtattaattagtaaggaagagaatatggtggatgcatgggtcaaaactgactcaggaaatttcagcctaggtggctaggtagaaagtggggtccttaaactgaattaggatgtgtaagagaaggcataagttgaggatcagggatatatagttccttttgggcatgttgacttttcaaggccagataaagattttcaatatgtacctccaaatacaggtttgccacccaagaagggtagtaataaacttatgagtcatttattcctgctggagagaatagatgagatttctagcaattcgctcacttttcatagtaattaccatgcttgatctatgcaatagctagtgttgtgcatacgctgaggttaccttaaatttactagtcttatatgtactaaattaaatgcttgcatatgccccttacaagcaagattgtttagcaacccaattatgctttttcttatacctatactgttatggctaattatgtattgtattacatatgtctttttgaattaatcaaatgtatatgcacttgatgtttcctcttagggaactgaccacagtgataagttaggaaaatagagatacttcaaattagaagaaatcttaggagcccccaatgaagtctagcagttgatgtaaaggtttcagaaattgtcctgtgtatccatgaaaagctgtttcatttccattttgcaaacatttcaggaaacttttttttattaaattgtatttcttccatagccactagcccagctagtggaagaacaacaaaattggaaaagcacagcaacaagcctctgcctagtaaaaaccaagaaagcaataaacctttgccaagcctataagaaaaatttaaaagtccaccgtttatttatcttgttgtttagatatatctgtctcattgttaagtcattgtgaatgcagggatttataaaccctacactattatcactggagggttcccactgcttttagaatagagtgttcctaaaaaaaaaaaaatccatttcttttactttattgacaagaatagattatttcaggctttgctggataatcccatctttggcctttggggctttaaaccgtgtttttctctaacgttctggttgatgctggtaatgagaaccagttttactgatcatagaagtatgagctcagagtgactcactaattccaatgtgtttccaatggccaacttgaaaaagctacatagggggatgtgagagctaaattactgaagaccatcatgttttcctgtggggtttttccatgccctgaatatgttatacatgctttttgttggtgttttcttctctgttctatttgacattttaaagagcagaagtttaaagtaagtttcttaagaatccgtaacagtatgcccgtatctccagacaaatgtttacaaattggattgtggctcaaagatttaactttccttcatgtctttttctaaatacaaagttcaaaccgaaattgtcaagagtgaggattcattgacagacaatcagcaggaggtccttttagtggaatattacctgtgatacaaaaggattaaacatttcaaatataaacctttaatctgtgctatctaattactgacatctgaaccagtatcaaggaatttgtcactttttcacttttgtaattctaacaaagaaaagaagcaagaaacgtaattctgcatctggaaaaaacttctaatgcaaaagcatgtagctttagtcttttctcttgagatggactaggatatgttccctgtatttctgatttgtaaagattcagcaaggcagctctgttactgcaatcacccttgcttatgaagttatgtagacagtcccatgtaaatcagaatggtccaaccatttgatcctgtccatttctattacacatggtcaggcatatgatgagaaatgttctggctaacacaatttcatcttataactgtcctagaaaatgaaataaattgttacagcattggtttcctagcagagccaaaattatgcaaggaggaaagcccttctacttttcctcatatccctgtactctctctgataaatctttctctctttccccctctccatttacttttggtgctatacagattcaatttattagacaattactaaattacctcatattattgcttaaagtgtatcttctcttctttaatttgttaagtttaataatctccagtgaatatccattaaagagcatatgctttttcccccattttgaattgttaaaagtcattagaactaggattttgagccaatctgaaatcagctagatattccttgtattgctttttttagaaaacttacttattgactgttcaggggaaggacatatttgtcctaaagcaggctgttaattatcatgaaaacttacctattggctgttcaggggaagcacatatttgtcctaaagcaggctcttaattatcacatcagtctagccaatattgtgatggaatactgaaagtaaaggagaaccaaaaatatgtgggttgtatttccagaaaaatatatgttataagagaatacgaaacatgtggattgtatttccagaaaaaaatgtatgtgtatttgaaaattaaagattccttaggggaagaaaaacttgttttaaattttattaatctcaaggtatttaaaaatcctctgaaagaattttaaaggctgcaaattataattatcatgtaattaattaattcctgaaatgtttttagcagaatcaagaacatttctgttgcctggaccttggaagaatgacagcaatgaaaaagttcatattatttgccagtgtttttcccttaacactgaaaatgttaaattgctctatagttagtgacttattggaaaaacgaaaccagagtcattcattcctctattcattcaacatacattttttgggtgtctgctatgtgccaggcactgccattctatattcagttagaatacaaaaccaaaccaaaaaaagatcctctcttcatggaatgtatcttccagcaggggaaaaataatttaaaaactaaaaatgctatggcaaatgatgttaaatatttggagccagattttggtaaaaatagcaagcaggtgtaatttgtcttttagaaccccagccattattttcaacatcttttcttcccacttggcgatgtccttccttcaagacgcttagatgttccaaaaggtcattctttctctcttttgctttttcatttaaacaacatttaaagagaacccactatgtaccagatatgtgctgcaccatattcagagatttaatgcagtataaattatgtatagtccctgtctttatgaaacttccagtgtattggggaagagagaaatcaaatcagtattttaaggaataagaaattaaactggccatacattctattaaagaaagattcatgggactctaatctcatgcatgtgtgtgtgtgtgcatgcatttggtgggattctcttagagagggtcatgggaggcagaaaacaaccgtcaactcccactaaactaatagtggatgcttctcccaaaacctctcctgaaaaatttgatctggttattagcatcttggggtaaatgaagttatcagtagacttaagtgtgtgcaatatttttcctattactttgtaacaaaacgtttgtgaaccttctagaaaattccaggcatcagcaagaagttcattggtcttttaggtttggagtcttctatgctttggaataatgtcctccttattcagattacagagaagtccttcactctgcattttcatgaggcaattatataatattgtatatactatcacaaaagattaacctgaatataacaggataatgtatttatggatgaaggaagtgaagctcagagaggttaattgtcatcactaatatcacacaagttggtggcagagctgggacaggtatgtttcaattcagttaacaccaactctatttcattatatctggcttgatttttttcattaaattttgatatgtcaggttatataatttaacctagagtaaatcaagttggcagattaataaaaaattattattggattcttctgtatatgaaagacaaaatattagtatgttatctatgtcctttaatgccaatcacattagcatatgaagtaagatattttttaatattttagcaatcctatcattatatcttaagtggaaaggagttttatgatttagctaaaagctttgattttgacagacttgttcatccaaatactatcataatttaattctttgtgtcctaaggttagttaaaacctttgatctgacaggcacatgcatccaaatgtaccgtaatttaattctttttgtctcaaagttatgttatgttgggtgatatgtctgaggtaaatatgccttatttttaatgttcataatcactgaataagacccaccttaatgttataaatattgtagcgctatttcaggttatcagattaatgatactgtttgcactttataaaaagtagattagataactatgagaaaattctatgtaagtatctaaaactatatgctaacattcttttcaatttctacacgtaagatagtttattgttgcagcatataattaattttgagcattatacaacatttttatttaattttttaagatgagactttttttcaaaaccctacatattaagtctaaaagatcaaagaactctgaatcaaacccaaattgaatagtttcttctaaagtaataatattttgtcattttccttatattagatattatctacttgtaaaactaaaaagttataaaaacaagcaaaaagctttatcttttttctttttatatatgcttgaattatttttaaaatgagaaaacaatttttaataaaggtggaacatttcctactcttttaaagagtttttcctgattaaattttaaaactacttaggaaattttgcttataatcctgcatttatgtaatggcattgagaataatttgccaaacacagaccttataatactacagaaacaaatccagagagctttactgaccagctactgactcactaaatgaaagaaaaagaccattcccattgaaaaataatatcaatattgaattatccatccatggcatgggggaatacagcatctcttccaggaagtcagagatggacaggtaaaatgaagagccagaaaaagaatttctcataaaagaaagtagagaaattaagctttcctggaggagaaatgcagctgttcgagctgtggaatttcaatgcatgcagacctcacatctatctcatatataggtgtgtatacactcgcttcatgtgaactttgtgaagtcaatcattgctccatttgctaatcccagtttcaatttttgtcagctgtccctctatattttcagtgtaaatccctgtctctttgtaattataaccaaaacatacatgtgtttaatcacctctctatcttggacaatttttgttttaatacttgggatgccttcatggtgtaggcctagggaatcctgccttgaactacattcaaggggcaggaattctagctgcggattccatttccctgtaaaattatgcagccctggctgcataatgctgtcactgcctgaagcagctgctcctgctgctttcagcattgtacattgtcaacttttctgtcacttcattcacaaactttgctcccacattgttcacataatcatctctttgcttcttcctacacccagattttaaggaaaataattatgaaataatttggtagatataatatgattttagagtagtaactccagaactctttagaaaagccagttgttcccttattgatctctctactttttttttaacgtacttaggaaaaaattgtcgcatgactatttaccgcaggtctgactcaagggaaaggtcatgcatggcagtaataagaagcaagatcctcacagacatgctgaaaattagccacatggggttataatcaaaccagatcaagaaaggtgactgagaccaaataaaatgaaatgtgaattgtcattcacttttgctggtaagttttgaaatttgaaattgaccagcaaatttcctactcctcttgtgtctataaactgaaaaactgggaagttcatttattctttgactactagtaattttgtagtatgagtaaattggaaagtatgattactgttcttcacaatgtaaaggtttaaaagaatgccaaactaagcactgcattttattgttgttttccaaagccacaggtaaataaaaagttttctgtttttctgaaatttttgcatactactactttcatccaaaaaacaatgtcctaaatagatgatttaaccatgtgagttcacactatagctgtgtcactaggatggggtgaaatcatcatttcatatttggatatatccttggaatataattttttttaactttgacaactaatttcctgattcgttaaagtccctaatgaatatacataaaatagttaacttaaatacctcagataggcaggtcatggtggctgatgcctgtaatcccagcactttggaaggtggaggcaggcagatctcgaggtcaggagatcgagaccatcctggctaacatggcgaaaccccgtctctactaaaaatacaaaaaattagccaggtgtggtggcacgtggtctcaaaaaaaaaaaaaaaaaaacctcagatatgattataaaccagtgaagctttaatatttttaattaagtttgaattgtgtacatttgggggtgccgtgtaaaaaatacattttaaaaggaaggtcttataccgaggccattggatattaatatttgttgggtctagcctatgaagaaatcatggaattataatttgactttttgttttggtttgctgttgttgttttgagatggagtttcactcttgttgctcaggctggagtgcagtggcgtgatctcagctcactgtaacctctccctcccaggttcaagtgattctcctgcctcagcctcccaagtagctgggattacaggcgcccgccaccacgcctggctaattttttgtttttttaatagagacagggtttctccatgttgaccaggctggtcaggaactcctgacctcaagtgatctgcctgcctcagcctcccaaactgctgggattacagacatcgagccgcagcacctggtttagttttttttaaccctttataaaatacccactatagtcagaatagccactcagaatatgtgggttagctgaatttgctatcccattgccatacaaattctaaaagctatcaactgacagactgtttggcaggggggtgggggggctgggggtgcagcaaaaatagtcaggaggaatgacacaataaaatattaccaatcaattaaccagtgagttgacaactggccttgatcagagctaaggagaaagagggctctccctataatgagctgtgattaacaacaggaattaccgaaatgtaattatagccaactcttcagagatgagccatccatgccttgagacttcagggtctcagtaaagatagaggtatttttgttcttgattactaagataacaattgagccatgtttttagatgcaatccggtgtgtctacaagccttcatcatattttagagttatttccttcctacagtatgtttttcagcttgatactcagtgatctcaggcttattcctggggacccagagcctcctgctgaagcaaaacatccaggcttgctcaacatagacagtcccttaacttacagtgggagatgcaagtcttgtggctcaactgtgactctaggagttgagtggtagtagcatcacccagtgaaaatttcagactaaaaaaaagacagaaaatgacatggcatctccaataatgtttacttttgtggaaaattgtaatctccttgattactttatattgcatttgtgaaacttactctattatagcttgttaaagttatttaactgtaatttatctctcagttatttcacagcaagatataacagaggccgggcacggtggctcacgcctgtaatcccagcactttgggaggccgaggcgggtggatcatgaggtcaggagatcgagaccatcctggctaacaaggtgaaaccccgtctctactaaaaatacaaaaaattagccgggcgcggtggcgggcgcctgtagtcccagctactcgggaggctgaggcaggagaatggcgtgaacccgggaagcggagctttcagtgagccgagattgcgccactgcagtccgcagtccggcctgggcgacagagcgagactccgtctcaaaaaaaaaaaaaaaaaaaaagaaaaaagatagaaactcagcattcgtgaatggatgaattaatgaatattctttattctaaacactgtacagtaccaaaatatcttttaaaaagttatgaaggctctaacattgcagacggtttggcatatatactataatttgagtaccccctcagtatttcaagttgacacaattcttactactaaaagtattgctttatcaatttcaagccagctaagatagacttctttaaaaacagatcaatttttgtttctaaaaatatatcctaatatcagggtattattctaccacagagaattcacattgattgtctatccatttaaaacaatatagttatagtcttttcacagtatttcaaagacttggataagctggcggtgtaaacatttcctcgtgggaactttataaaatgaaaagaaaataaatgattgatgcatactcaaactaattgaagtggtactgagtcaaccagatgttttcacctgaatcatgcccacagatgctattgcttcattatcccttaatctagggattacctccattggctaactcgatgacctgtgagggtttcaaataagattgcctctcccttgtaacatacatcataaagagagcttgtttagaggcagcctacctccgccctgaacatgttttcaaggaagtgatcagggctgtttgtttttcttgctgttggatgtggtcttcagtgaagtcacaggaatggaatgagagtggccacagttgacaatggagctatttccacagctggctgcaaagagtgggcagtccatcacagataaactagcacatggggatagatgatataaaacatctgtcacaatagggataagcaaaaacaacgtgcctttgaagattgtgttttaatgatgaggtggggggttctgtctctataataggaatgaaagatgtgttgttggtgggcagatggcttcaggcttgctcttgcatgaaataaagcaaaagtatgtgttaaaaatctctgacagttgtcaagtcacctgattttgctgaccgttcatttccttgcctatcccatgtgtaatctatgagaaaagaaagggagtgctaggaaaaaataatggcagaaaaaaaaaactggttctgaataattttcttttggataactttaatacatcagtataattttaactggaggctgagaggtcagaaaacgtgtttttgcaataagtttctttaatatatttgcatccccatgtttttttttatagaagttttgtaaggtaatataaaaatgctatgtcaccaaggccacataatgataaatatttcaaatgtgaataccaattagtagacataaagtcctatttgttcctgttaaaggagcagtgaggaaaaataaagacatcttaataaactatttttgatgtaattataatagtttggtttcccaccccatctgcctttgaaaataaattaaaaacaataaaattcacatacagttttatttcatatagttgctatagaaaaagaaatctttgcaacagacaaactgattgcaaataaatgccgaatattcttgcacaatacaattctatatataccctgttacatgaccaaagggtaccactgtcactgctgtcccccaaaccattccactctgctctggtaaggaaatggttgccattgctgcacactgaaattttgctacttttgccacaaccccaccggaaaaatggatgtcacattccttgctcatttattattttaatctgtctttcaactctaattcccttgcaggtgcttttgattagcagaagtcacaaatctatatctagcagcaaaagggtgtaggaaatgtttttagaagggttttcttttcttttttcttttttcttttttttcaattctacattgaagaggtaggattcacactgggggaaactaatgacatctgaagagagtattaaaaaataaatttctacatccatgaatggcagaggtacaccacaagaagcaactggactggtcaaaataagagatcttaaagaaagagcagtgccaggcatggtggctcacgcctgtaatcccagcactttgggaggccagggggcggatcacctgaggtcgggagttcaagaccatcctgatcaacatggaaaaactccgtctctactaaaaatgcaaaattagccaggtgtggtggtgcatgcctataatcccagctactcaagaggctgaggcaggagaatcgcttgaacctgggaggcggagattgcagtgagccaagatcacatcattgcattccagcctgggcaacaagagcgaaactccatctcaggaaaaaaagaaaaaaaaaaaaagagagagagagagaacagatttaaaggaatttgtgatgttctgacaagacttgactcctgactgagttttatggctgatgagggagaaggaaacgatcaagatgacttaggagtttctttgttattctgagaatcgagcagagaagaaagaatactctgagaatgaaagaggaagacagcattcagagcgggacatagtagttttgaggtacatgggattcggtcagtagttggaaatttggatcatgaattcagaagaaacaccaaggcaagaaagacttttttaaaactttaatttttaaactaattatagcacttttgattaatcaagtcttaacaagcgggaatattttggaattttacttctaacaccttatttttatggtatgtatattgagctaaccaaaatatttcgctgctgtctcttactattctatgcggcatataccatctcttctaatgcttggctgtcatagctatttctaactcactggttaagcagatgacgttatttggaaagaatggaggtttcagtgtgaaggttgccatgaaaatatgtcataggaaaagaaagggaatttttttgttaaaggagattttatgggtaaaggcagaaatcgtatggagatgattgaggaactatactaaatatcagtggctgtcatttataacaaggagttatattaatattactaatattattccaagctatctggctctcaagcaagaacaaacaaaggacttaacaaaatgattgagagtcaaaccaagaatctttttagaagcaatgtaatagaaaattcactcagagccctggcagaccaaatgcagagctaagctttccaaagtttatcgtgaatataactcacctggggcaggctctaatttagtggggctggggttcacctgagattctgtactaagctccctgatgatagtatccagtcccaggccatacgttaagaaacaaggtagtagagtttaagaacattctattaaactaaaaaaaatgttaaaattaatcatatagtattactgcttaggagaaatggcaataaaatctaagcggaataaaacatgtaactaagtttcttgcacaaatcctgaaacaaataggacactgaaggataacaagataaagctgtcttttatctcatctggacagttttaaatatattaattgaaatcttgaaggcctcagaatgtaacttgtttggatgctaatatataagttttaaccttagaatatgtctgttacaccaggacatattttatctcagcattagaccacagaacatgtcatcaatagggtatatactgagtttgaagcatgttagcaataataatactaatagaaagtgtgctttaaaaggagtaaattagttctttaatagggtcgtgacttcacacctgtatccttagatctagttaagtttccagccctaaccaggcaaattcctaaaaatatcttaaaggagaaaaatattctctgagggaccacaaaataaagtgctttttgcagcaaattgcaggacaaggaatagctactttcttagtaatagccaaaaattgaggtgccttgtgacatatttaggcaacttgcactataaacaatggccataagtaagataacaggcagctatttctcttgatcgcccctgtggtttgagcaatgattttccaggcccatttgccaataggatcttacaagaccttgaaaaggatttgcaagcaggtctttcagtctatttgtcagtaaggagaagtttttaatgagaagttttatgacagctcacagtcctgagtcctagttaaacccagataaacattttaccagacaaaagatgaggtccataaatattcagacgtcttctgggaaccctgtttgccttatcatttggaagaaggctggcctgagtactgcatccgatgtgtgcttgaaacttctgtaagttgaaaatgtgtttggaggtatacaaagtgattgctgtacaaatgaataaagcatttcttatcacatgacaaggtttgacaagaatctcaggcagatatatggctactaaaacagttcatggcatagcaaagtcctaatttaaaaaaccttaacctacatttgtggcagtacacattggctgtaatatgtacagaacatcttgcagcatttaactgagcataaataattcttccatagaatggaaatcatgtcgtgaactccaatgttaaacttccttgggtggggtgtggctctcagaagccctgggattttcatactaaataatgagaaggtcaagctggcagtggtcagactgagatactgtcaaagaaaagcagaggaagtgtatgaatggatcttttacgtccatctttttggccagagaatgcttctggtatttccattgaatcttcttgtccagtttgagcaaggagctgctgttattgtttcacataccattaaagtcatcagagacctgctggtgagcaagtgccattcactcactcagtccattagcaccactaactaagcatctgttttatgacagacactgtgctgggctcagaaccattaaaaaagaaatatataaggtattgctaatgataccagtgaacttaggattcagggaagaaataaagtttgatcatgatcaaagtgtgtgcaaaatgttatgggagaagagaggagcaagtgaccggtagcctgggtcagtcataggagttattccccagaatttagtatttgataagaattttagaagacacatataaactgctgtagaagcctagcgttgcaggccaagacagcaagggtaagaggtaagacggacaagagaatgatgaggaatacagtgtggtggaaagagaggcttcatgtgcatgggctggggatcaggctagaaaggtaaattgaaagctgtgtgatcctcgtagattatgtgtgctatgctaacaaggccatcccagacctacctgtagaagcctctttttgacagagataatgctgaaacagagtagaaagcacatgctcttgggcagccctacaactcattcactctaactggtttctgaataagacaagcaggaatagaaaaatgtcttgtcctgtcactgaactgtcctatctactcttacactcctccaacacatttaatgtagaatagccattgacttaacagtaccagtgtcttaaaaaggacatttccactatgaaaaactaacgcagctctaggttgcactttgggaaaggaggtcatttaacactgtttcccttataaccccacttagaacaaaaaataaggagaaactggtctgctcctcttcaaattttatatatatatatatatatatatatatatatacacacacacacacacacacacacatatatatgtatatatgcatacatatacatattgtttttaaggtagaaaaaattaggaactaatctcaatatttcaaatataattttttattatgaaatatatttggtgggtagagatcaatggttttctttctaaaaaaagtatagaaggagctgaaatatatttgattaatcaattcatttttaagtgtcatagctttatagtcttttgtctttgattttttttgtcttgtgctgtttttgattcctttaaataaattttggagtgtgcaatacatctgtataggaaagctatataccatgggggccctgcaaagcaaagactaaggactatggttatgccactaattttttcacacaaatagtctcattttttcacattatctacaccacaacacatgtatttttatgtaaactacagcagtttacatgtgtcctctaaaattcttatcaaataccacattctggggaataactcctatgaatgaaccagactactggtcacttgctcctctcttctcccataacatatttgaaccaggctactggtcacttgctcctctcttctctcataacatatttgaaccaggctactggtcacttgctcctctcttctcccataacatatttgtgagtggtagacacccccagctgaaagctactcattagttatgcgattggaatcagaagctgatgaacacaagttcaccctttgtcattgaagctctaaggtccttctgaagtggcctgggatctttctctaaacaattaatatttccattgactcagcagttatgatctccttaagtagaaaaataagaggaaaaaatatagtaacccatctgtgtaagaaatttataatcttaagatcaattctgtaatcaagtgtacaagtttaatgacaaaataattaagtgtcctattgcatattcagtcaacaaaatccctttgaccgtagagtcctcaaaatctcaaattttcaactctccctcaataatgcaatatatttaaaagccactttgctctattaggattctaaagaagctactgaaaacaccaaaagctactgataaacttgtttctgtagttttaggcacaaacgtctaaaggattaaaataaagcattattgagaatcctaattatctatgtacctgctttggtaagaaatacttcaatatgacatatttactttatattctcattcaaaatgacactattatattaataggtacttaaccaataattgaaaccattattcacagttgaataggcgtagtacataattaggattcttttaaagggatttccatggctaaaactaatttggctttagtgtctattaatattataactttaaaaaaaaatacttccagttactagttactgaatcaaaaatcaacttgaaattaaaagtgtgattaagagtacaaggaaaaaaatgctatgtttataattaatagatattctgttattgggaaatctatgtacatgtacatatctcttctacctttatcatatagcagtggaaaatgtcttacttctaaacattatacccctagcccatagctatatatctccatatagtagtccaaatatcatgccaattagtctaatcctgtccaagcataggaaagagaaacccagctctagtttgccccatttccaaaataaatagcaaaataagttagcactcaaaaataatgataaagccattggaagtcatgtaatagtcctgttttctttcattgcacaattatggaatttgggaaattggtgtatattataaccataatcttgccatagatctaaaatgtgctattagttgtcgggaacagactgtagatgaatactttgtgtcacttttctttctttcttttttttttttttttttttgagatggagtctcgctctgtctcccaggctggagtgcagtggcatgatcttggctcactgcaagctccgcctcccgggttcacgccattctcctgcctcagcctccgaagtagctgggactacaggcgcctaccaccacgcctggctaattttttctattttttagtagagacggggtttcaccgtgttagccaggatggtctcgatctcctgacctcgtgatccgcccgcctcggcctcccaaagtgctgggattacaggcgtgagccactgcgcccggcctactttgtgtcatttttctagttactgcctttcaaattcttcctcactttgtataaatggagcttatggatatatgtatatatggaccagggtttctgaaccctagcactaatcctgggtttgctggataattatttgtcgtggggaactgttctctgtgttgcaggatgtatagcaacatcaataaccactaccccctaggtgctaatagcacacctcggcagttatgataaccaaaaatgttaccagacattgcaaaatcactcctggttgagaacaaatgaaatatgtacatatacaaatactttttattctaatatatatatatatatttatatgtctcatatagcattagtcaaacttttttcatcaagcaaatcttggatttcatctttaaggggatggtggttgaagatgtcattaatgcgcatgtgtgagttgaactatggttttaaaactgaactgccccttgggagaacaagttttctcaagaattttgtaatgatccattttaacgagcaatctcaaaataacatttctaactaactactttttgattagaagttttattctttcatcattctttcggtgaactcttataaagcatatattatatacctcacactataaacagcactatagacactagacagtggtgaacaaaacaacataatttcaaccctttcagaataaacaatcaaaatgagaaatattagtaaatatttacagtttgtcattgaactgaaaaatgagtggtactgatatataaaattaatttacaaaaactgttttgagtacttactgcatgcaattcctatttatagagattacaaaagttgtataaacataatgtcttccctcttgaaagatgtaacgtggaaagaaacaagtagacaataataaaggggaaggaggtattaagtgctaaagtgaagttctaggggcagtgtggcttctggcttaccatgtaattcatcatttcccatacctccagcatttgtcaaatccttccaaaatgcttacaaagttaaaggctaccacctttgccacatcttttgaatttcaaacataattttttaaagttggactgcactactacgttggttggaaatttatcaaggtagataaggattaatgattgtttctaagaattagagacatttcttactccttttgtttcttctccccacaaaagcctttcttaaaccctgaaccctcatcaaaacaaaacaaaacaaaacaaaacagttgacatcaacaaatgaaagaaattagacatccctacatatactacaagacaaggaatgttgcatgctaatactgcagaacactgcatttggacagctattcctcaagctaccttcatgccatttatattatgagatctctgttgctattaggtatttgttctaggaatattaaaaactggcaaaaatcagacatgaataaaagaataatgaaatagtgacttaaaaccacctttttaaaattcatatatagttttgtgtgaataactataggcaatcgtataatacaaatcacagacattttgacttgaggcatttagataagacagcagaaaaaaagggatgctgtttttttaattttcacttatccaaataattttatttttgtttttccatttctatgagttcaaatgcaaggctactaagattccaaatatgaaggattcccaatgtgttataatagaagccaaactgatcaaattgaagcatgtcaggtcatcacacttattcagtgattatatggtgtgattattcagataatatttctaggtcagcccatcaaaaatgcaggcttagcccctttgaatgtttttaacaagatataatgtgattatcacataaaagaccatggcctgtaaaaagactggattcaaacaaataaatgagaaacagcgtacataaaataaagccacttgtttgcctgtaagaactgtaacactggctttatacgatagcagtttttagacagagcatacttcttaaactttagagtatatcagaatcacctggagagcttgttaaaatacagatttcaaggcctaatcccagagagtctaatttttgtctactgctgctactgatccacaaaccatagttggggtggcactgacctagaatactatcacaggaatattaatgcagctagttcttcttattgtggttcatcttctgggattaatataggtgctaaaacagctatgtgtgctctagatggtagagaagccacacatgcttttccctgatttgccaatggttttgtatttcagttgggaaattaaaatattgaactttcaaagacttcaaatttctttcaaacattggcagaaggttaacaacacagatgcttttctggccttaggtcagatatatttacgccacacatgatgatctttggaaactttacccaaattactgttgaaaattgtttatttcagaactagggcaaccagatccaccctttgtctcttgagtgggagcagctttgttttgcaaaggcagtggctaaaaaggaccagacctttccatcagctgtttggtcattgtattttttagtggaattatagcattgtacaatatttttctttgcagcccaaacattgagcaaagccagacatccagagatgctaaaatgaaaaatctgtttcttcttgctttgccacttgccaggtgaactctgtcagacaccacatcctatacatctcaagtaaacaaaattatgcttaatgtgttggcaacatctgtcacaaacactcttcagcctatggcttaaatatattaagttggagtggatttgacagtgtatttaataagtcaaagttacggttgtggatactggctttgccatgctaaccataaggcttttcttttcttcttttgtatttatttatttatgtcatatacaatacaaaagagattctgtagttttaaataagcaaagtggctggcaaactccccctttgctgtaggtaaccaacactaaacctctctaagttgtctgtcccagacaaagtatcattaagaaaattcatttctcccaggagttcctattagttacttccagtttactccctgactgtacatttcttccattcccttaagattaaaaaatttgtattcttaataatttgtaggattgttttcactgaatgtttttattgaatgcaaacaagactctagattcttacatatccttccccaagaatccttattttattttttatttatgtgcaataactgatctgcttagaaagaactgttcatttatgtgcagtaactggtctccttacattattttccactctgtgcctagtgttgctatttacaattccaattaatgataaatcccttcttacttttccctttgattgtcaggtttctggtttatacacagaagcaacactcactctatgacatctgtaatcaaatgagtccccaaatactgctttcaatgaaaagattctgaaagagaccagacaattcttccaaaattaattccaagtgcaggcattcgatccttctcatcatgcatgaattttgattgttctgtcacatgctcacctacctcatctgcatattgcctttaaaaaaaacacacccctggggaatgagacaacctccagggtattgagaagaaagtatccttaccaaacgcagtttggtttttatctctgatttacatgaatgatcctttttgtggctagagcaagctgtttagaattgaggggtttctgggattgtgacagtttagctgcatgttggaatgtctaagggcaaatattctaaaaagataacctgtcttgagttcaagaagagaatcgaagtcttgcagctgctaagcattagaatgttgtcaaagtaccactttttggttgaaaaaaaaaaatgcttcaggacttccatcttaactctgaggttattctataatttatccctaggtgatttaagaagaacccttgttcttcttaaagtgtttacttctggtctggcacaacaaatacctgaaatgaaggccagtaagtattttttaaaaaaggaaaacaataaagatggttttgttaaaaagattcaggcagcagaaagaaaagtgatgtgtctctgaattataattaagtaaaagcttatcttatgtttctcatttaagaggcatcctgatgaatgacaatgcacagaagcatcgagaaattcaaacaacacaaatgcacaattgtgtatatttacaagctacagacctttaaaataacagacatgttttctgattgattcctactgaaaagcctaaatgtctttgtgaacaaagctggccctgtatatcaagcatttccaaatatttggctcaatttctattatctctgaaaattaatggggaggagcccacagagaaggcagagtgatagcctgatctttttcacagatatagtcaggaagttgaatttcgataataccaggaagaattgcttagtttgagcaaaagcattttaggaaacgcgcagtgggtaattagtttgggtgccgagatctggccatctacatgcatctgtccagtgagaaaaataatgtttagggaaataatttattcagatacataatcatttgatcataactgagtatttaaatgggttgttataaaatatgtttctacttttatcacaatctttaaataaacattgaaattatatactctcaaagattccatccaattcaagctttttaagtttgttttttaaaaatatttttccttctccaagttaattactgcaaggaaagtagcagggtagagaaagagaaatggaaggataaaatgacttagctccattcttcactcaccatatgacactttgcatatggatggaagttttttaaaatgtctgtaatttcttttatccccaacaatgataataaatcaaaagacatattctagacatccacttttcttaacatctgatttaaaagttgacacttttatttttaaaaaaaaattgtggatggacataaaaatttgaccagctctaacagagtttggtattctgtcttgtgtctaaaatatagatagatagaaaacaggtcaaaaggttaggaggaaaacaaatgggaaatagtaatttcgatttttagattatcaatgatagattttaatatgtccttcaaagagatccagttcagaaacccatgtgggccagcattatccctcttagtggtagattgtattggggtgactaagaattatgtatgtattaataagtaatagataaatgacataaaccaagtcttatcaaataacaagaaaattagagaatttccactaatgttcatatgtttcagtcagagaagtttatatttagaacagtgggcaagaggatatagatgattttcaatacattctacctcaaaaaatgaaaatgtaagtgacatattttagacacatcacaggtaaattacctcagaagaaaggaagatgttaatgccatctattcagacaagcacaaaatgacatgaatggacataaaaattatatacagttgaatttagcctttttagtaaaaaagtaaaaacatttgatgttcacacatttacaatttacagtgtttatttgtaagaagtctccttccttgtaggatatattttcaaatggacattgtatatgcttgtagggtgctgtgattacaccaaccatggaccatcccatgtcaatgcagccagccaacatgatgggcccactgacacagcagatgaatcacctttcgttgggcacaacaggaacggtgagttgaagagattgttttgtttccttgaacttttttgatcagatgtgatattctccatttttactggcattatcagtgaaactgtgtctgtaccatattcgttgactaacacatctttcaggtttcagtatgaataagctgcattctgcatgtatgttcagttccagggcacatgtactcacagtggcaaggctaaagttctattgtgtcattcagttacttcttgttttttatggtacaatgtaccagatgtaatgtctgtttttggaaaggtgtcctttttgtatgcacctgcaaatctagaccctttgacttaatatactcaatcctggttttctcttcccagctgcttaccagctcagctactatattattagcaggttatacacaactgaggggccagatctatgactgatactattaaatcaataaagagtaattgaggtataatcgagttcttttaatccttctttctgatatgttgatatggatgatgttgaaaagaaggaagggaacctaatgtgcttgattttttcttataggttgtgatatttttgactagtcatctttctcctcagagaacaaaagtgtgctgaaaaatgcctattgcagcctggattttgtatcaatgaggcattttaaatcataagaaaaactttgtttgatttttttaaaagataattccccaaatgttcaaggaggcaaaagcctaatacaatctagaatactgaaacttcattagttgccattacagagaacaatgaaaccatgaaacctaaccactcatgtgacaccttcagtaacagttttattttcgtaaatgttagtgcagataatcttgtcatttaacaaaacatagaaataaaaatatgttttcttttgactgaggcagcttaaatattgaagaaagagcactggactaggagtcagaaatcctagatataaaacttgcgtaagccctgtagtttctgtcaatttttgggaaaataatatctctagtctgaattttttctctatctagttgaagtattaaacttgatcatatatgggtccctttgaatattcaattctgtatttttaagcctatatgtcttacagttaccacctctgtgattcttcaattatgctgactcattctccaaatatctatgtacaatatgcacactagttgtgtatcaggaattttaccctatagcaatggcttgcttgccaaataaatcttgttgactcatgggcttttaagaatataagaagttactggcatgtccactgagaactcactaatctgtcctaaataggaagaaagtcaatataatttaatggaaagagccacattctttcaataaagaaattttagttttagtaacataaacaaagtgcctatcactaagatctcagttgcagaacctgtaaaaagcagtcgatggtaacttacctgtctgaatgcttgggctggatcaaatgatctcttaggtttctcacctacacttttagaaatcgtgtctaagatatatttaactatatgctgtggtacagctaattttcatcatggagatagagcttgaagacaatattttattgcttttatcaaagaattatttgtaattattttgtgcgttactaataagcaggtcctaggaatagtatcagaaggcctgcagtttcttatttttattaatatattgtagatttccctccatatcagccttcgtgtccttcagtgatcataaattctgaataagtgatgtaatgtaattttaccgtattgaataacaatctggaatctgattaaagagacaattataatgcaaaacatagaaactctttaaaatttttactcatttggttcaaaagtaaagccaactgacttgctaaaatttaagtttgcaaactagtagaaatataagagctagttaactaagcatatgactgaatcctttagggaattaaaaaaataagctaaaagacacagaacagactcagaattaaaatagttattgattcaataacatatattatgattttgtatttgagcattccaacaagaacacatttgtaagggaccatgacttttaggcagctggtgatagccaaatgattcagtaataatatataacattctctttcttagagagtaaaagttttaagcatatgatttattattaataccaaatttccactagcttttttcttttcaccctttacatttgttctaaataatgcttagatacattataagatttgcattacctgatgttatggaaaagtgtaaaatttagtaaggtttagaagaggtagagagaaaacagaattactttgttgattcgtttaacaaaatataattaagtgtggttggtgtccagaatattgttatattgttttcttagactgtcactctaattcttcgatatgccttcatagattcattttatctgaattttgattggcatttggagtgactattatccagttgaggttgattttggaaaatcagatttttctaccttattgcatctttccaacattttcattgatggggaaggaatcctggcatcatggaaagatcagttggctttgtttttaaacttgagttcaaaacctgactttgttcccttattagctctgcatgtttaggcaggttacttaacctctcagaactttctcattttacaaagtgggaaaaataatgcttacatcccagagatgttgtgagtgttaatgaaatgacaatatgcagcatatcttatacagtgtgatacccagtatgtgcttctcaaatgagctgctcatacccttcacctccagtggcttctaactggtgggagtctagtttaggtagccagaagtgatgtaacacacagtaaaatccatggtataaatcacttacctgcactatttcacttgatataaataatttctttaacgtctccatttctttggctgctaacattctcttttaaggtagcaaattcaaaagcctgtagagtccagccaagtcatattaatgaatgaagtggatcaagttcaaacaaaaacccttggaaatatataatcaatttttaaatatttgcctatatcataaacatactcatactatataaacatatatgacattggagattatattttagagaagatgtattttccatgcaataataatactatctctgcctgagttttgggcaaatagaagtgagaggtggtgcctttggcagcctgaaatatggatgccttgtctgaagaggacagccactattccattggtagtacagctgttgtgatggctattgccacatggacatacagacccagggtggtctcactttccaacttttaaagataagctgaattcttgaattttgatttgaaatttctccatatttaaatattgggtccagtttgtcccaagaactcccagtttgtgactcctgcccaaggtttttctggttctcctcagacctctctggccattccttcttctcttcctgcacagattggtaagccagagcttcatttttaacatacttatgccacatgattttcgtaagcaatctcattcagtctcatggttttaaaccctggcttccacgttgactcctaaatctcagtccccaatactaacctcatctaataatttcagactcatttatccaactacttgctacatatctccatggaaatctccctcagacatctcaaagtcaccatgacccaaactaatctcatgagctttccagaactttcttctaactgaaacctgttcctcttgtgtgtttctgctccctgtttccctgcaagctaatgacatgaccattttccctgtagtcaaaccatacatctaagacccaatcaagaccctttccttctccctcaccaccatacacaattacttttcaagtcccactgattttctctcatagacattggtcaaatacattctttcttctacatttctggagtctctgccctgggactcatttgataaactgtaatagtttcctaaccgttcttcctgctttcaatttcaatttgctccaatccattctctaccctgttgtcacaggtagtcaatctaaaactatctgacgtctctctcctaactgaaacatttcagaggatttcagacatctgagcccacagaaattctgcaaaacaaggtgtgaacagtgacaagtcaagattaagattaagataggattctaaactctagaaacagatgggttccaagggcagagcagagagctatccagtgaataatctagagtaggaagtgatcagggctgacggaagttgtagctatattggaatttgccatttttagaagggggatcttgaacactggcttagtcccactcttccttttaaagtccctggctaaaggaattgtattgggccaaaacctctttttccttttcatgaaagaagatatattcatctcccatgacctcaaattttgaaatgaatgccatgtagtttaattaacctttctctacaatttgccacctcaaatgtttattgttcaattctctattttaagctagacagaatctgcaggcctcaaaaaaaaaaaaagtgcatcttatgcaagcagtgtaactgttttatttcaggggtctgctgaccctgaaggattttcctagcttttctacttttgtttatttttttgtcacagcattcccttgatggaaccaaagccccattatccataacttcttatcactttattgtaagctttagcagaaaccactggagattttactgtgttatgagaacctccaagttgcatgacaatcttgttttacaagtttcttatctccttttcatttgttcagttgctggtcaccagtggcttacaatgtcaccagaatctgttggaagaaataaaaagtttttgttctgcaggttttgtatctgcagtttggtttgtgttctccaagccactgatgatttgtgatatcatcgatttccacagtgtaaccatagtcactcacaaaaataaccttgtaattgtactccatttgtccccacagttctctagcatttttcagtcacaccactccttcactgctctgaaattttgatagtatcaggtgaaaatcctcaattattcagtttgtttagacattgttcttttttctgttattaggtatgaatataaatattaagacagagttttaaaaagctaacaggatgttaaatggactctgattcaggaagcagtatcataaatggtaatgggtacatctaaaatagttttttaggaaaaaatattaattaaaacactcaaatacaaaacagaaaatatatctaaaaaggtaatagtttaaaaaaattggtttagtcttactttaaaatgaaagacctttgaagggagtcttataaacaataaatgagctggcattaagtgtaagtctagtagtacgagtgtgtatttgtaaatattacacttttgttgtttaaaaaaatgaattctgaattcaaataaattaccgacatagtaaaaaagcctcaatagataaaatgccaaagaacatgaacagatagttgataaaagagtaaatagaatgccaaggaacatgtacaaaaattgtaatgaaagaaacagaaacagtaattaaatatacatgtacatatatcccatcaaataaagctatcaaaatgcagtacaaattgctaatgaaggtgtaggaaaataagcattctctagcactgattgcttgatgataggaatctaaatttgtataagtaccagttggatagcaaggtagtcagtcgagatacttcaaaacatttatactgactgaccaagaagttatagttttgagaagctggtctatggaaatattctaaaataacagaaaaataattatacctcaaaaatatttgacacggtgttctttataatgtctaacaaagaagaataattaaatatgccataatccatccataaaccagaatgtaatgcagcatgaaatcgtaagagaaataattgggaaaaagtttatttataatgtcaaatttgaaaaaatggaagtaaggcaggctgtagtggttcatgcctgttatcacagcactttgggaagctgaggcaggaggattgcttgaggtcaggagttggagaccagcctagataacataacaagaccccatcacaataaaaaaaattgaaaattagctaggcattacattattgtgtgccctgtagtccaactactgaggaggcagaagcaggaagatcaactaagcccaggagtttgaggttacagtgagctatgattgtgccactgcacttcagcctgaatgatggagtgaaaccctgtcgaaagagaaagagagagaaagagaaagaaaaaaggaaggaaagatgtaaatttgcatgtgtggagttcagtatcaactctaaagaagtattataaggctaaagagaaatataaaacaagtgtggctatttccaggtgatgggattaggagtaatgtctattttaatcattatgcttttctacattatccagctattcagcaataaacattattggcttttattatttattttaaaatgtcataagtatattcttggaaaatgtctagtagcatggtccaataattaacttttttttttttttttggtttggagtggaaatgtgtgattgcaatttttcaaaaggtactaggagttactactattatttaaaaaattggaaaaacttttaaaatgattctaattattctagatttggggattataatcaactcagtagttcaggtatctgttgcaagaaacaaaataactcatgtgtctggtttatttgcatttgaatcttttgatcatgtttgcttttgttgctcaaagtgccttgcaatgttcaagttctaatctgtcttctcacatgccatttactcaggagagagtgattaaaattgaccttttgtggcaaggagatgaaagtgagaaatacgtgatagtccaaaagttgtcacatgggtggaaaaagaaaatttgggatttttgcttttaataaaggtcatataaatggaataagagtcacacaagaggacctatttaaccatgtgttggcagttgatttgaatctaaacaatatcaagtttcttttagagtttacccctccaaggggagtggggacaaaattagaattttccatttttagaaggggaccctaggcctatgccatattccaatctcctttttaagatccctggctaaagaaattgcagtgagccaaaagctcttttttcatctttaaaaaatcagatatattttgtgccatgtaacccctaattttgaaatgattgccatgtagtttaattaagctttatctagaatttgacaccttcaatgctaggagacttgggataaagataaccgtcacgttcaatagattctgttctgtgtatctctgctcccacagttacaacacataaagctttttggccttgaggtgaaagcaccttccgctctgcctcactgacaaccactgggatcagagctagagctgagtaataaataatgaaattttgccttcaaaatgtgttagcctccatagaatatgagaatgtacaaattttttatttttctcttttaaattttagttctttcttttgttctccaggactttgtttcgtatcatgctctgggccccctctaaatgggctgccttgtagaactcttttgtcagccagagagggcaaaaattttatattgattccctaagggaggtaccaaacaggctgtggaagatgacagtgtttcaggaaaaactgtactgtcccagcaagtctaatgggacctaataacatgtacagtattgtggtaatagggaccatggtatcaaatgcaaatgaggaatcctaatgcctttactgctctaaggcagggtgggtcaggcaaccatatgacacacagcggactcttccacgtgttagggctgattctattttattttcttttgtacttcattgcattctttctcatgctcttttcattcaaagattcaatcccaagacaggattatgatactccaccagctgttgtgtcaggtaggaaaattctaattcttttaagactggattggaggggagagatggaggttgcctggttttttcccaaactctttaaagcagtgattctcaacagaggtgggtgcaggaaatttgaattccagtttgcaagggggcatgtgtagttcagaaacataaacttaatattataattcagttatatatctggaaaataaatgtgttgcattttaaatagaaagtaaaaactcaaaaccattttatctgtcaaggatacacagaagatagagtctgtgttctgtgtatcagtgattctcagtgttagacacagtcatcaaattcctgaaaagtgggaaaataattttatgtatagcaaaagacggcacagattaataaaaaatagtttgagaagcactgctttagagaccagaattcttctaaattggaaaatcatcccatttgcttgctcagcaccctgcatagggtctgacacatagtaggtactcaatataattgtttgttgaatgaatctaaacttcaaatttgttcccaaaacgattcttttggatattgaaagaaaagctgccattattctatttatacaaaaaagtggcagaggttgatttgaaaatatgttagtgtcttgagggttttaactagcaatatttcagttgtttcataaaatttagtagtgcagtttgtaataggatatgtctatgtaaagaggtggatttttattttgaactgcacagatcttcttgtgctttcattttgattttgaattttgatttattgcaaagagaaaaatgggcacaattttttatttcagttaattttttaattaaataaaatactggcaatctgaagaggaggaattctttgattctttgacatgtcagacagcaaggtcataaaatacaaagagaaacatgcattagaaagacagaagaagaaacaaaggtcagaaatagactcaaagaccccatggagcagttgaatctgtcaacctgctggtggttttcaagcaggggaaatcttgcttttggccacccgtttgcttgacccagcatctgaagggtaattcttttttaatttcttatagccttgtttagttatgttcctggctgaatactcatctttaaagttcaattaataatgtcccattgaggaagaatacgttagcatttggccgcgaagtcatttcggtcctctttaaggtctctacaataaattgccactactgaaaatatcacttagtttttcccaaagtgtatttcctgtcatatcttaacatgccaatttcatttaggatttagggcccctgggaagagactatatttcatacatggtacttttgtttaacaagatacatctactcttggtaatttaccaatattcataaaaataaaagacacaaactagaacttaccttcaactgggtttcctgattttactttcaagaacataatgaagaaagcaagcaaatcattaaaagtacttatcagatatcagtcataggtcaggctctacgtaagtcaattgaggcagaagatctggctgacaatctaggctcaggagttctcacctgattgcatacacagggccactgaaagttctagagcagataaattacttgataaaagcaatgctttaagaaactgaatctgaaagttttgtgtggtcttgagcaagaagacataaaaatcacatggaacagttaaaaagattagatatgacatattgtatttataataaaaagtagtcctaggttcccagcagtggagtatgaaggaagggacccaatatagagttaatatgaaaaataacattttgggagatttcacagttattttccccttgtaagatttaattggtagtttgacataagtttcacagacttctttggtctacgtctaaatagaaatagacttgcctttccaaaatgcttgttaattggctggtaggacaacttcaatgacttttgagaaattgaatctgcttttctcaatccttggccacatcaggaaagtgaaacaggcaatagcattgtaatatctccttcccaaatcttccaatatgtcaatattggacaaaacaaataactctttgccagtgtagaatccaactaaattgttttaattgattgtagtcgagatatctgcttgacaatttacagatacataacttaatttcattcaatcaatatttcaacatttattgaacaacttctgagtggtagacactacacaaaagtactggggatacaaagatgagcagaaaatagacccctgattaaaatattatggtataatattagaccattataacattaatagcaacatttatttgtgttgtcgtgatgtgaaatgcataaagtatagagaatcaagaatctagaaagaatatttgaaatcctcaggaagacaaatactgtttggttttctgtgtaatattaagtgacatcatcttctgagagtgagtgagagaaggcacatagtaaggatttaagaagaacagagatttggaaaactatggcatgagaaggcctatgaacaatccatagaattttgaggggtagtagtgggggttcatttgaagctatggactatgtatttgtgtgattaatctgtgagaatgtttgattttctgcggtcatgattagtagccaagaaggcagacaggcaaattaatgcagggttaatatttactaggtgaagtgaggaaaaggatagtgtgcaattatgatattggcaagaaagtagttgagtggcaaactgtgggtttaaggaagaataaagaaggaagaaaaaagaaggcagtggtggatgagagatagaaaacaaaatatacagattagcagtttcaatgagatgtactaactacaatgtattttactaactacaatgtagttagcaaaatacttggatttaagattttggataatgaactatttcttggcaaagtttgaatcatgggagcaggtggccacagtggacttgaggtgaaagtgacagaagttaagggagttcattaatgtgaacataaaaagtgactaatgaagtgggggtatcttgcatattttagttttgttttcttcgttctttgccattaataaattatacatggctcaagaatattttacttaggaagagtctgagttacatatttaagcttcaacaatgaatatgtcttaaaaataataataatctgggaagaaagagttaaagcagaaatggtgatgttcaaaagaaagaaggaagcttgggaaacaaaagcatctctgatttatttccctggagtcacctcttgttgcctacatctctgctaggccttacctagctcatttcaaggagggaagacagaaggctgaaactgccctctacattttcacaccaaagcaggaatctattctccttttagtatttcttttccataacaactataactcctttaaaaatcctcctctcttaagcaaatgttaatgaaaaaatatgtaaaggcatagtaaaatgccattttctatacatggttgggttttatgaaacacctatgaaaaccgaagataatttgtagtcaaatttttatttcagttgttttgagcttaatttccttgaatgacatcagcatgaaatcaagcagaagactactatcactagagaactaaagtagaatcaaaatctgtcctctttttctaaaaagctttgagttcagaatttgaacctaggtttgaaaaaaatttttttttaaaaaagaaaagaaaaacggggcctgaaaaatacactgaaaagaacctgtagaacttgtggagcatattttcattctttgctctaaccttttatgcaccagctgaaacaggctgaaataataagtgttatcagtacaacttcatgatgagatttcacagaaaaagtttgcataaatcacaatatactggtccaataagaaatttttaaatgtctgatttctaaccatggagttgtgctctacgaataaagttcttcattggagtacatgatgcaattaagacaaaattcactgttataaacagcatgcactttctcacattgtttttgtttcagcaatctaagtttgcattggaaagcctcattaatttggaatttgtgatgtccaagcaaagatttaattgaagcctatttcttatgctgcatcttaggtgagaattgctgtgtgaaactatcctctatcatccagaggagggaaaggcagagtattttagctgcttcaaagaacaaggagaacaagaccatctttcaagctctaagcaacatttgttttcatagataccatgagctaattacaaataatttccatcttttaattaaaaattaagttcattagtacctccaattagcaacaattagccattaaattgtttttattgtaaaagacctgacacattgttatgtgttcccacaagccacacgtgaaaatcagtttcattttttggctcaaataccgtgcatttatgttgactacaaaactatctttctttacatgagttaattgattttttctttgtaataagttcttagagactttgctttacttattcttcatttattcaactaatatttacagagtacctacagtgctacaaaaaactaagggtaggtccatttcttgcccccaaagaacaaagattctaacagagtaaaaggttataaagaaatgtcatgtaacatagtatatgacagacatcacaggagtggtctgcagagcaggactctgtacatgatatgtgcgcaagtatttgacaaaaataggcatgtgaatgctgagttattgtgttcctgctggtgcatttattttgttcgctaaattataaaaattgaatcattaagaattttcctatgggaccataattgttatttatgtattaaaataggcaactagattggactagtatataaatatcactgttatttagcccaggttgttttttggtttttgttttgttttgttttcagaggatgggataggtgggtgtaaaattctatgcctcatcttctaatccagcaagcatttcctgtaaagttccagatagtaaatattttaggctttgcaagccatacagtctgtgtcataactattcaactctgccactgtagcatgaaagcagacacaagccacgtgcaaataagtgagcatggctatatttcattaaagctttatatgcaaaaataggcagcaagcagaatttggtctgtgtgctatagtttgcctacccctgctctctctaatcaatttatttttataggtattccaaactaaatactgtcactgatattctttataatacatctgaagtgaccttcccttaaaattcgcatttttgagcttttttatttcataaaagacagaaatatcagaaaatctgagatggtagacattgagatggaggttgagaaaaacatgtattagtgttttagtgtgtacagaataattgattataatagtgatatattaaaaccctttaagaatatttttattttttatatatttttttaatattttcattatatattggtcttttaggacttatagcagcaacaggggatcatcaaaaccaggaaaatcaaacatatattctgtttattatcctcttggcagcctttagaatcctatacttttagaaatttagagaaaagatgagaaatatatcatcccaaaagatttgtagtaaaatatatttgacatctttgtcacaccacctgcagcggtttctgttactgttgtgattgttgattagtgtccactgatattactcttgacctgccagtattttagctattctatttccccctgggtaactgcttccctgagtactgtgtgctgctttgccatccgattataagggaaagctttcctggtcttgtctaaaagccgaacactacacagggtaagcctgggatggctggagatatgactaccctctgtggcaaggacagagaaaaacgacgcttagtgatgcagcacacacatcaaatcaaaaggcagcctctcaaaatgctttctgcagtagaatttttcagtgagtggcagcaactgacttaaagcatcccgcagcagcagcacacagcatcacttagtgcctcagtcatctacaaaagggcagagcctacataatacgcagcagagcactttcaagacaacaatggactttaaagtaagctaattgcgtgtgcaggaatcagcacatctggtactgaaatcacttggttccgtttttaaatcaacagcacaaagtgggcacttgaggcgcctgtcagagaatatagtcaggaattgactatgtatgattcagcccttgccagaggcatgcgagagacatctgattctggagagatactgcctaataaacatgttaacagttctctagaccctatgttaaattagttaatcagaatgcaaaatgcccgaaccataaaattggacatccctattgaaatgttttctctcagttaaaattttaacattttaacctcttctttgagaagcaatatattacacgaacatttaaacaatgttaccagccttttgagatgccacagcaaaccaaattgtctgttattttacccaatgtcttttatataaagaagcaaatgattaatagatccttgagttcagtgtctcagcaagtatctctctccagatgaatgaatatacttatttttaactaacaatgtaaaatacccagcttaatctattttcccttagccttggttatcaggatagttggaattagatggagtacattgcaaatgttcctggtagcatgttctctctattgctcttaactgtttgttgatttgctggtatttttaattgtgcttcttaatgcagtgcttaattttgtaaatcttccacaaattcaacttggaagtacaaagcttctaattcctttattaaaaaataaatgaagaaatactattgggctaatgggaagtttgtgtgctaaacatcttaggagaaggacaaaatgaaagacgattttgattgtgtgttgatcttatctaaaaatttaccaccagacactgtttgttttcattctcacacatgcagttttaaacaggaaaaagtatggtagaaaaaatcaaaatgatttttagaattcacaggatgtatgtgatttctgagtcatattatttaataattatttaacaattagagttacttaaattttctgaagcttagcttttctctccttaagagtagagagtatataatctattcattaccctttatatatacacaacaataaaaggattaattgaaaggatatgtccaaagtacctagtaagggcgtgactcatgatcgatattaaataattgaagcttcctttctgcttcctttctttggattcaggaaagtgtgttaggactttttgaagtatcattaatcttatatttgctatgttagattaacttatccaaagaaaggagtctttttaaatagtttccaaactcaatatctaaaaataaaagaaatagtaagagagttaattatattatctttcttattggccaaactattatgatattactaggtgaattaatataaatataaatatttaataacatgaaaaagaatgttcataatgcacagtgaaaagatgacaaaagtgaacaatcattatgattttgaggcctaaaacatacacatgaaaaaatctagaaaagaatgcataaaattattatcatatgtgttttcaatttctatttctaaacttcttgaaatgttgctttgctacacttataacttattaaaactttaataacagtctttgaaatggcaacagttttaaggagacatttatgtaccagaaaaacatgactgtgtgaaaatgaaaataaagatgatgataatgagtgtggtgattatatgcatgatagcagtagcaggggtaacctctaacattttccccacctctactcatcacatctcaacgttatggcatttagagcaagattaaaagagacattatatctctatatagaattggcagaatttttgagtgattctataacctaaattcattaaattttatgtaaatccattttccacctaccagaagatcaatatttccataaccaatagttaatgccacttttcgtattgaaatcacatttcaaatgatatattatgtttcttgcatgcagcagttggaacaacctaaaatcttcccagtttatattatgtgagacatcaaggctcttgtggtttacagaactgatatgacatatttgaaaggggacggtatataatacacttttaattacatattatgtctaacttctgcaacttagactactactatatacacattttttttacttttctgcttaaaatgaaatctgctgttgatttgtttccctgagctgtaattacaaaatacttatacttacccaatcaagctgatataacttctaagtgcttttgccacccaagatattgtttattcttccttcctttctaccactaagttttatttattttgatcatgtggaatatatcagtatattattttttatcagggaactttatgtgcctgctctgagtctagcagtttgcccaagagactcagatacgggaatgcacaggactccagatccaggaaatatgaattttattcataattgagcagttacattagcaaataaaatatgaagatttggtaaaaattattgagattcttgagatacttgttctggagggttgaagcctactagccaaagaaaaccaaggatcaactatagtcaaacatagttaagttcattagcttgctgaaacaagggaaaatatataccagttgaactgtggagcatctcagaaaaggaagtctggaagggcttattacagaattagagcttgtgcaatatgactttgggaagggtgtgaagaagtgaccatttattccacattgagtgatacctggaaatgaggggcaattgaatgattgtgtgtcttaagtgttatttagtagttgggaagaagaaagaagggctcgagctgtcattggcaaagatgcagccgtcattaatgttagacagaaaaaggagatgtttgattgtttaggtttgcagaatgtacctgtctctcttttgtccaccacagtccttgagtggccttgtctgaaaattgttgataatcttcgaaaattgtttagttgggaatgctatgaccttgcaaatagcttccagctaattaaaggttatttgaaagatttccataaattctttccttatctcaagggcaattataatattgcctaacaaaaatatagcagaatattaaatgtccttggtgaaatataaatgcaaacatgagagagggtaaatagtgttttattcatcacatagtatgtattcatcacatacatactatgttctaggcactgttcttagtgctctacgtgaattgatttgtaacatttgattgtcacaatcattccgcagggagtttctttgtcctctgcaaattcgttctttataagctcagctggacccacactcatatttatgctccttcagctgttttaacctttttcacctttttaagttccaaacacgagtcttcccatttatgctaaaaaatgactctttctttatgagaagatcagtaccacattttatccgatcttcaaatgtttgtttcttcatttttcccttcttcctatcttcctcttttgtcaagccatagtcctctttttgtcaatgttaacccctccttgtatgttcttgatttcatctgcctcaatttgtttttatggtcttatagcattgattgccctctatcccagatgcaccttattcaatatatatttattcaatgatgatttttcctatgcttaatgaaatgtgtagatccttcttgcctcaagattctcatggtgctggtcttatgacaccttgcttttcttcatttttttctcagtggcatcatgtgcttcctcacttttaactgttatatagatgacctccaaatctatattgctaaatcctatcatctattttgcttttcatgccaaagtttccaactacttcctagatatcccctatccactcttacctggcccatttatagttcaaacttcttgttcacaatttcaaatgtctcataatcttgcttctcaatccagtttcttctgcagacttccctagggttcaagcaaacctctataagcattctttatctaagccaagatgttttaagtgtagctacaagtttaagattgttagagtctttgacagtagcttagagtatagctcttctctttggggtgagaaccatatgatttaatattatactaagcttagagtaggacaggaaatcttttaccaattggtgagttatttttctttcagccaatggtgcttaaaacctcagaggtgttttggtgcactctatgccacatgcaatcttcctttttcatgtagatcctatttctacaatgtattttgaatctgctatacccattccattctattacccaggtccaggctgggttcttattacattctagttttattatttgagtgttgttttggtgtcaacacctagcacttctctttcctattcatccttcacacacattcttgaataaattttgagattaacatttaaaaaattttatcttcaagaatatgttaatagaacaattaggagttaccttagtagataattatccctaccatctgatcactgccagaaagtaggatacagatcagatttctgaatctaaagtcatcttttctaacagcagccctctaactcataaccagtatataccagaaatgttacactacttaaagctgtagttagcttatggagattgttctacaaggaggcaggtataacaactatgtcataccacagaaccacagtatggtgatagctgctcactggcctctgcttgagaggagacctaaaatttctctgacagaaatattgcccttcctgcagctaacatcgaagtgaaggggtatgtgtcttgaaaggagtcagcgggttctcattcttcttcgcttcttccatttgagtctatcatccaatgccgatttcagctgatagtttaaacatatggtcctgtgtgtaaccagcagcaaagaaagctacattccaagtactttttaagaaacataacaatttcaaagtcactgccactcatacctttcagaaccttgactaagagaaatgatatttttggagaaatatttggatcttatgcagtatatccattttccttggatattctaagttagatccttggattaagctaaaaaaaagctgttttacctggatgactgcattccactggacccgtgaaacagctcttcatgaagtatgccttggcacagtaccatttgtttatgtgtgaaggacactataataaatagaccttggaaacttgctttgctatattaaggctgttgttcattagaccacacagtgtctgctcctttcagactcacaggagaaacatctgtcttccttccatattgggaatcattcttcaatgcacctagcttattttcttacctaatggacacagtgacttgtataaatcattgctaactaactctggtaacattttaatagcatttatttaattagcctgtttgctcacttcatcttactctctttcccttcacctgatttttctcacttatttgacactgcaatattttatacaaccttgaaagctgccttaaatagttttgggaagcaaggtggactataattaaataaattctggaaatggaaatgactagtgtattatttttatctgtcaagagccacaactcaaatactacaagaattgagaagaacttatcaaccttgtgttcaaggcctgccacagtataatcttcaagctactttcccaactagttttctttctgtctgcttcacgactcttctttcactagtcacagttctttgtaagatgtgtttaatggtgagtgcttgctttctttgctcatgctcactttccacctggaatttcttccctgccacacctgccatctctgtggatcaaatcttgtgagtttttctgattttcacactttattttgaaaactctcaaagttttctgttaccacctgatgaattccaccttctatgagatatttgcacattcctcgctatcttctctccaacctacctttagattataagttcctggaggtttggagatcaagggctctgccattccttttatcccttgtggtattaaagctcaaatttttgatctaaataagtctttaagtaagaactctccctcaattatatacttcaatgttggcttttactcttaataaatgtggagagaaaaagtgggggaggtaatactaggctagtcagatgcctgaattttctctcacagttctaaaatttaaaagtatctcttccagaaagttactctaggtaactgccatcctttggcaggactagcacaatatccatctaactggtcggactgattcaagccttctttccattcaattcattttctctacagccccagagccacgtttctgaaacaaacaggacatgtttgaaatccttttgcagctttcaggacataatcctcagtccttagcctgtgcaacaaggcccttcatgatcctgatgcctcctttttcacattcatctgttactacttctgttctcccgccataatgaactgctttcagtttctgggatgggccaagcctgcagggtctttgcataagtgggagtagataaacatgagcaaatcctcatctagaatgtgtttcctttactcttcaacctgctaatgctggcttgtttcacagcaattgtctcaaatgttttcttcttcttggaaggttgccttatccttttgtcttgtcttagagttttctctccccttaggtgtctgggaatacctttattgtaacatttagcacactgaatcaccatttccagtttaattatcatttctcccctctagagtaaaggctataaactcttagagcagagactattcatatttaccttatttctccataatccagcaacatctggcccatggtaggtgtttattaaatattcattgattgaataaatgatacctatatgtaaaaatgctgattcgttagacacacattctacataatcctaactttctcctcaaaagattaaaatagcaagaggaaaacagactcagaattcccaagaagtctggaaatgtgaatgaacaactaagtgcagagagctttctgaaggggataggaaagactcatgacaagaaaatggagttgggaggatgtcaaaggatttggagacagtagaataattggaaaatgatgcttatatgaaataatttaagatattggtggaaatgtacaatgtgtctattagaaatatgaatgcccttcagcaatgttgcttatctgaaaggtttcattttcttattttccctagatagccatcatattcatttatcttactaacatcctcataattgattccccagtgtcaccttgtaaaagtacttttatactcttttcatcgccaagatacctcacacgtacaccattgcaaacatacactggtcccaatgacatcgcatctttgctttatttttatttttttaaatagattcttcaatagcctatgttatgccttttacagattctctggacacacatcaggtgcctcaccatcattgttaatggcaatcagagcaagtaatgtcttttagttctttttcattaatgaaatggaatagcaccatattcagtctgttagtgatacactattacatcgagagcttactgaagaaatgcagccagcctgtgtacatagggctggttttccttagatgtgattttcagccatgaacaaacaaggcaccctttcatctagcagaaaagtttgctgtcttcccctctttctttctcatttgttttgtcctatttttttcctgacagtctgcaagaaatataatgttttctaaatgacattgaaaattcttgcagattaggtattcaaagggataaaatatcaattaatcttttgaaagcctttcttttttgttgttcctgtctttggatttcagtttcttgaattccttactctcaaagaaatgtttttcctcttgatttttctcattataaaactggatataaatgtaaagtaagcagtcattctaggtattttttaaattcctttagcattcatgcagaaaaaaaaactctgctgttattttaatccctttaggaaagtatgtttgattgatgccctcgaacttggctagttgaggcaaaatctgagagtttttttttaatcctctaaactcaattgaattatattgccttagcttatactttataaggtgcccgttagctttaaaactcacactaccggcatttgtgcttgtcaaccaagccatttagactttaagttcatttgaagaattaaattaatgtgatgctaaagcgtctatttgtgtataggtcccagttcctaaaataacttttcttagcagtctcaccaagagtgaaatgctgttagtgggctaaaggaaagtatatcaacttcacaggccttattctagaatcagtaatttgtgtgttaaaaaatgagtattaaagtaggcagtacagctgatgcattcttgttaaataaagcatgaaagttcagcttttgtgttcatttctgcagtgagttccctttactacccctttttcaccatagttcattcctgaatggccagacataatgagaagatacaagaattcgactgctcaatagaagtacctcatcccatcttaatgctgagcaggcagcatatggtgaaagaatgaatacaagttttgaacaagatgagcatttaaatcccagctcttgcatggactgtatgtatgggttctctgaagctgtcttaccatctgtaaagaagataatgacaatactcacagagatatactatgagagttagatgagatattggcatagtcataatagatactcaatctttcccacatcacaggattccaagcttttgacttagcatgttcaattttttaaagcaatagttctcaaactgtgatcccagtctagcagcacagcatctcctgagagcttgttagacatacagattctcaggccttgacccagatctactgaacccaaaagggttgggcagggggtgagggtggaggtggaaccatcttatttttaaaaagcctccaggtgactctggtgcatgattctgatggtgagtttgagaaccacttaagccaatcagcaaatcacaaacattggctgtgtgtgaatggggaaaggataaaatgattaaaacagtgggaggtatataagttcattttcatgatgctgcgaagaattactcaagactgagtaatgtgtaaaggaaagaggtttaattgacttacagttctgcagggctcgggaggcctcaggaaacttacaatcgtggtggaaggggaagcaaacacatccttattcacatggcagcagcaaggagaagtgccaagcaaagtgggaaaagccccttataaaaccatcagatctcctgagaactcactatcacaagaacagcatagaggaactgccccatgattcaattgtctcccaccagatccttcctgcaacatgggattatgggaactacaattcaagatgagatttgggtggggacatacccaaaccatattatttcaccccggcccctcccaaatctcatgtccttacctttcaaaacacaatcatgcctttccaacagtcctccaaagtcttagctcattccagcgttaacccaaaagtccaaatccaaagtctcatcagagacaagggaaattccttccacctatgagcctgtaaaatcaaaggcaagttagttacttcctagatacaatgtgagtacaggaattggataaatatacttattccaaatgggagaaattagccaaaccaaagggactacagaccccatgaaagttcaaaatccagtggggcagtcaaatctcaaagctccaaaatgatctcctttgactccatgtctcacatccagggatgtggtacaagaggtgggctcccatggccttgggcagctttgcccctgtggctttgcagggaacagctcccctcccaattgctttcacaggctggaattgagtgcctgtggcttttccaggtacacagtgcaagctgttggtggatctaccattctgggatctggaagacagtgtccctcttttcacagctccagtaggcagtgccccaggggggactctgtgtgggaactcgcaccccacatttcccttccacactgccctagcagaagttctccatgagagttctctgtccctgcagcaaacttctgcttggacatccagatttttccatacatcctctgaaatctaggcagagattctcaaacctcaattcttgacttgtgtgcacctgcaggctcaacaccacgtggaagctgccaaggcttggggcttgcactctctgaagccatagcccaagccgtaccttggcccctttctagccatggctggagcagctaacacagaagtcactaagtcctaggctgcacacagtgaagggaccctgggcctggttcaggagactatttttcctccttagcctctggtcctgtgatgagaggggctgctatgtagacctctgacatgccctggagacatttttcccattgtcttggtgattaacagttggctcctcattacttatgcaattttctgcagccagcttgaatttctccctgaaaatgggtttttctttcctatagcattgtcaagatgcaaattttccaaacttttatgctgtgtcacctcttgaatattttgtggcctagaaatttcttccaccagataccgtaaatcatctctcttaagttcaaagttccacagatctctagggcgggggcaaaatgcctccagtctctttgctaaagcatggcaagagtcacctttgttctagttcccaagaaatttcttatctccgtctgagaccacctcagcctggacttcattgtccatatcactatcagcattttggtaaaaaccatccaacaagtctctaggaagtttcaaagtttcccacatcttcctgtcttcttctgaaccctccaaactgttccaacctctacgtgttacccagttccagagttgcttccacattttcaggtatctttacagcagcaccccactacacagtaccaatttactatactagtctgttctcatgctgctatgaagaacttcatgagactgggtaatttataaaggaaaaaggtttaattcactcacagttctgcaggactggggaggcctcgggaaacttacaacaatcatggtggaaggtgaaggaaatatatccttcttcacatggtggaaggaagaagtgccaagcaaagaaggaaataaccccttataaaaccattagatctcatgagaactcactcactatcctgagaacagcatggaggtagctgcccccatgattcaattacttcccaccaggtccttcccacaacatgtgaggattatgggaactacaattcaagatgagatttgggtggggacacagcaaaatctaatcaggagggagttaaactgacagtagacattttagtcttgtgtagaatgttaatttttctttatcagtcaaactccttccttccagaattatacatatatatgtataatatatattaatatatataatatatatattatatatttttatatatattttgtatgtataatatattatatatgtgtatatataatatattattatatattgtatatataataagatatatatacatatctttcttttatgatttccttccttttgcatgactttttttgaagactgacataatttcacttaggttggaaatgagtgtattggtccccttggagaaaaataaataaatccctatttgagtttatccagtacaataaaaactatcaggataaaatgatataagtaggaagtcctagaaaaaatgaaatccaatgatcagtaccttcgcatagtatgtgtatccgctatggaatagttggttataacttttagaattctagaggtctaaaaccagcatgatagctcattcctcatctcttggtctgaagaggagggaggcacaattgtttataaacataacggcactgaggtggggtgtatgggtatgaaatcctagtgtttctacatggttactttatataggttttactgagttaaagctctgtttttaatatgggtcaagactcatatatatatatatataataccataccaacaagccctgcatccctagcatgatcctttgaacctctagtaattagggcagtaactaaattggccctttttattttccactggtgtcaataccagctaagaggattacatcttgcttggatattaagactcttttcataactgaaagcatctaatcctgattattcactgtttgtatttataaaatatataaaactagaaataaatctctcaactgaggcccaaatgtcacagtcaaattaaccttccttgactactgattcactttgactcacagctaatgaggacagctccttttttttttcttctatttttctctcagtgcctgtagaataaatcctacatagaactggaaatagattttattgtgcatatatttacttatctcctgtgcccttcacattgcttccagttctgtatcccctgtgcccttcacaattgcttccagttactttggagatttttttttttttctgttttactttcctgttcagaatgcaagataaaatcccatggaaaaatgatcaaaatgcaaagtactcaacacaaaattataacttaaatttgatttatcttttggtcatatagatttccttagggaacatatttaaacatcatttcccaaacattccctagagtaagagatctgaaattttgtagcctagtaaaatcaccatgtgagcattaaatgcccgaatgcccaggttacagtccaggccaattaaatcagcatatccgtgggtggatccaagcatcagtagtttattaaatcttcccaggtgattacaatgtaaagccaagtttgaaagtttgaaaggatcctaaaggattcctctcagtcttatgagatattagtgttgtacttaaacaaaaaacgtataagatttaccacctttgggaaatgtagcagactgtttttgtcttcttacaaacacttaagagaatcacaatgaacattttcacattggctaagctcggtgtctcatgcctgtaatcccagcactgtgggaggccaaggcaggtggatcacttgaagtcaggagtttgagaccagcctgggtaacatggtgaacccccatctccactaaaaatacaaaaattaattgggtgtggtggcgcgtgcttataatcccagctacttggaggctgaggtgggagaatcatctgaaccctggaggcagatgttgcagtgagccaagatcccaccaccgtactccaggctaggtgacagaaccaggctgccccctccaaaaaaaaaaaaaaaaagtgtattaaaggctgagtacataaaggaagaaaatggatgtaaagaatgaaggaggacaagagaaaaagtaactcacacctccaagaaaaactgaaaacctatttagcttggcttatttcatcatatttcaaatttgtttgctcagatttcattgtatgtagaacacctgtaaaaattttattggaacacatcttccatagaatataattcagaaaatatggattaaaaggaatccaccacgaagtgtgtttctgaaatgcttattaaaaacccagttatatcagatcttcctatactttgttgtcatttttgatatttaaaatagtgtgtgaagtataacataagacttcagaaattatgtgaagtatctaatagaaatagggtatttggatcacaagcaccatgtgaaatttagttttaaaaagtcagtctccaaaaattaacagaagaattaaatgaatggtatgtagaggactccaacgtttattaacactggaaagggaaatccaatcaggtaagaaagtagagtggtatgatagcagaaatacagtgccaggatacattagatctagtggcatgtgcaggataagcttaaacaaactggttagtctgggactatccaatatcccatttctattatactcattcaccattttatattctcttctcccgggcttttctaaaaactttctttttctgaactttatacctctggaggctatctaatcagttgttgtctacagtttcttctttccttcatgaaaactaactggtaacctttcctcgggagtctcccaactccttcttgggggccaattgtatggtaaaatactaatttctgaatgcattaacatttctttttaattttcttaattttattttatttttccataagttattggagtacaggtggtatttggttacatgagtaagttctttagtggtgatttgtgaaattttggtgcacccatcaccctagcagtatacactgcaccatatttgtagtcttttattcctcactcccctcccactcttccccctttgtccccaaagtcaattatatcattcttatgcctttttgtcctcatagcttagctcccacacatcagtgagaacataacatgtttgattttccattcctgagtacctcacttagaataatagtctccaatctcatccaggtcactgcaaatgctgttaattcattcatttttatggttgagtagtattctatcatatatacataccacagtttttttatccgctttgttgattgatgggcatttgggttggttccatgattttgcagttgtgaattgtgctgctataaacaagcatatgcaagtatattttttgaataataataattatttttttcctctgggtagataaccagtagtgggattgctggatcaaatggtagttctacttttagttcttcaaggaatatccacactgttttccatagcagctttactagtttacattcccaccagcagtttagaagtgttccctgattactgcacccataccaacagctactggttttttttattttttgattatggccattcttgcaagagtaaggtggtatcgcattgtggttttgatttgcatttccctgatcattagtgattttgagcattttttcacatgtttgttggccatttgtatatcttcttttgagaattgtctattcacgtccttggcccactttttgatgggattgtttggttttttcttactgatttgtctgagttaactgtagattctggatatcggtcctttgtcagatgtatagattgtgaagattttctcccgttctgtgggttttctgtttactctgctgactgttcctttttctgtacaaaagcatcttagtttaattaagcccaaaaaactttatctttgtttttattgcatttgcttttgggttgttggtcatgaaatccttgcctaagccaatgtctcgaagggtttttccaatattcttccagaatttttataatttcaggtcttaggtttaagtgcttaatgcatcttgagttgatttttgtataaggtgagagatgaggatccagtttcattctcctacatgtggctaccaattatcccagcaccatttgttgaaaagggtgtcctttttccacttttatgtttttgtttgctttgtcaaagatcagttggctgtaagtatttgggtttattttttgagttctctattctgttccattggtctatgtgcctatttttatatcagtaccatgctgttttgatgactacggccttatagtttaaaatcaggtggtgcgatacctccagatttgttatttttgctttggctatatgggctctttcttggttccatatgaattttagaattgttttttctaactctgtgaaaatgatggtggtattctgatggggattttgtggaatttgaatactgcttttggcagtatggtcattttcacaatattgattctacccatccatgagcatgggatgtgtttccatttgtgtcgtctatgattactttcagaaatattttgtagttttgcttgtagaggtctttcaactcctttgttaggtatattcctaagtattttttttcagctaggggttgagttctcgatttgattctccacttggtcactgttggtgtatagaagagctactgatttttgtacattaaccttgtatccagaaactgctgaattctttgatcagttctaggagttttctggaggagtccttagggttttcaaggtaaataatcatattctcagcaaacggacagtttgacttcttctttactgatttggatgccctttatttatttctcttgtctgattgctctggctaggacttccagtactatgttaaagaggagtggtgacagtgggcatccttgtcttgttccagttctcagagggaatgctttcagcttttccccattcagtgttatgttggctctgggtttgtcatatatggcttttattacattaaggtatgtcccttgtatgccaattttgctgagggttttaatcataaagggatgctggattttgtcaaatgctttttctgcatctattcagatgaccacgatttttgtttttagttctgtttatgtggtgtatcacacttattgacttgtgtatgttaaaccatccctgcatctctggtaggaaacccacttgatcatggtggattatcttctcattttgttgttggatttggttagctattattttgctaaggattttagcatctatgttcatcaaggatatcagtctgtagttgtctttttggcttgtgtcctttcctggttttggtattagcgggtgatgctgtcttcatggaatgaattagggaggttccttctttctctatcttgtggaatagtgtcaaaaggattggtaccaattcttctttgaatgtctagtagaaatcttctatgaatccgtctggtcctggatttgtttttgtttttatttttgtttttgagacagtctctggcctcactgcaacctctgcctcccgagttcaagtgcttctcctgcctcagcctcctgagtagcttggaatacaggtgtgtgtcaccatgtccggctaattttttgtatttttagtagagacgggatttcaccatgttagccaggatggtcttgatctcctgacctcgtgatttgcctgcctcagcctcccaaagtgctgggattacaggcgtgagccactgtgcccggcctggactttttgttgttgttggtaattttttaattactgtttcaatcttgctgcttgttatcggtctgttcagggcatctaattcttcctgatttaagctaggagggttgtatttttccagaaatttatccgtcttttctaggttttctagtttatgtgtgtaaatgtgttcacagtagccttgaattatcttttgtatttcagtggtgtcagttgtaatactgtttcatttcttagtgaggttatttggattttctctcttcttttcttggttaatcttactaatgtcctgttaattttatttatcttttcaaagaaccagatttttgtttcatttatcttgtgtatttttgtgttttgttttaatttcatttagttctgctctgatcttggttattttctttcttctgctaggtttgggtttagtttgttcttgtttctctagttctgtaaagtgtgaccatagaatgtcagtttgtgctatttcagactctttgatgtaggcatttagggcttgatctttcctcttagcaccaccttagctgtatcccagaggttttgatatcccagagggcaggactcactcccacggctgcccacccggcctgcccccgtaacagtctgtttccaggtggagggcgagacaggcttgaaaacttgcccgaggctttctgcctcccagctgcaaaggaaaagggctttagatcttcccctgcctgtgaagtccgctagccagattcatgccctcccctgagttctggccgggggtttctctccccattcaaattgttacaaatttcagatagagaattccttctcccagtggagttttagctcctgcccctctggccaccctcctgctggatccctgtggtgccaggcaggaatgggctgcttgaggacccggtgagctcccagggcctttctgctgcttcctctatccctgtatttcactcagctcggctctcttaacttgactcagctccaggtaaagtcggaaacttctcccacaaacagaccttcagcttctccagtgggggtgtgtgctcaggagaggagggtgtcccgttcccacttcctcagttggggcactcacagtatttagggtgcttcctgggtcctgcaggagcagtccgcttccttcagagggtctgtggatcctctcaggattgctggtttgttcttgcagtcgatctagagctaaaattcacagtgcaagcctccgcatgctgctctgtccggagctgcaatctagttctgccttccgtccaccatgatacctgaatgcgttaacatttgaccctagtgatggaatttcacacgctgtgatggatatttaattgtaagacagacgcagagtgatggtggtcattctccatatagctgtcctaagagatctcaaaaacttctgcttaattagagtctcttaatcatgaaaagttttgagttatcatagacagtggtgaaaataattaaagtaattaggcaaattggatttggataaacattttaaatggatagtcaaatatcaatgttggagaaggttctattggcaactgagtctgattgacaggaaaaaggaagattaaatgcctaatagacaaggctctaagattatccctggtctgataacgattttggataattctaccagagttgacaatgttgtgtatttctttttaactgatttcgtctcttgcttaatttacccttctaaattcatatgatctccccaaccacaaagaacagttaaacacccagcacaaaatggtttaattttaaaagaaattgattgattcatgtatataaaaagccaatagcaagagctgcctcaaatgatatcactacatgtttttttctttatattcatttgcatttgtcttcacattccatattctcacatctgacaaatctatgtcctctctatcatggtaacagagtcgctgacccataagcttacactacaccatgctagggaagagaataggtcatttccaggtgtctctgtatggaaaagagaatgttttcctttccagtagcttaagtaaacatcaagtttcattggctctgttagggctattttcatttatttctgaacaaatgatcaggatacactaactgtagagccaatcacattgtaactacatggtagtgaaatgggggtcataggattttcaaaagaaatgtggattatcatcaagaataggaaatgaatgctgagttgtaagaaaaaaatgcaaatagaagttcacccttgtcatcattcttcatatccttctgtctatagtgtacaacttttgattgatttttacttttgaccttaagtcattgatccctcttttaaaaatctgtcttgttttataaatatccttgagacaagacttaagagtatttttaggaaattcaaacctacatatttttattttctataagtgtgtatgaaattcattaaagaggatgttcgtttatatccaccactttaaaacttacagcagtttaaatataattggttttcagtaaaaattgtatataatgtaggaaacatgacttcattgggcaaaactctagaaaaatatgtagttaacatttttgggaaaaactgtccgtagtagcctgtgagttagtgaaggagtgtccccaggccctaaacagaaactaatgttttctaggatatagcattcaaggaccaagaaactaggtgagaccagatcaagaaaattaggagataaaaatgaagagtaatatgatatctgtattgctttttctttttgtttgattttggctgccttcttctttgctaccacccaataatgagcacttctggtttgcttatctatttatttcattagttttattttttttcgaagctaattcttacacgcctctcttaatgttcagaccctttatatcttattttttccagtgaatgggagatattaagatttgtccttttgagttgattatatccaatttattttctttgtttgagaatgtaactgagatatcactgggtctctcaatattttgaaaccagatgattgtctaaaatcctcaatcccataccctttagaagtccaaagctttatgcaacatgtatttgagttttcaagggcattaataatcacttttatttgctctctttattctaggttgattttgatgtaaaatttaatcttttttcaattttctcataaaaatcccactcagagtcacattaatgaagatttgggatgtgttcaggaatcgaaacatattgttcgttccaataacttcaacttgaatataaagctacatctctgtggtttaaatgccttttaatagcttcaccaaagtggaatttcaggcccataccactcatgggctcctctctcctccgtcttcccgccagcttcttcaggttttctctcttcccatctttcttagaaacacaagatgctcccattccccgctttataactgcctcctctcttggactcacttctccagctcctccagtgtcttctctcttcccatctttcttagaaagacaagattatcccattccccgctttataactgcctcctctcttggactcacttgtccaccctggcccactactcatctcttctcacctcctcaaaactacattatttcattaccaatgatttcagccttggcctcacttcagaatgccttttaacagagtactccacagccccatgttgtcaagagcttcctatgatggaagatcttacttatacatttggtatcctgcttctttttgtcctaatacacttgtttgtttgtttgtttgtttttcattttaagttgtttcataagtggctccagtttcttctcaaatatgttaggtataggggaatttttttactggttcagaattccttttctcttaattttaatatttttcctttaattctcacccttaattattcaatttaaaaaaagaagcctgcttttttaacggactttattctcctttaattttttatgttctccttgaaaaccttaagctttttacccagagtgcttaattattcattcactcactcattcattcattcactcaacaaatatatattaactaccaaccataacgaattaggcatggtctttctagtttacctggtttgactgctaagagctttagcagaggtacagagaaaaagctgttagatgtcataagaggtagttaccatttcccaatgggggactgaagcaaggcaacatacaggaatttagcatttggactcagattgagagacaggttttggatttgtgttgtaggtggattaaaaaaaaagtttgaacacagtggaaacaaaaaaggccagaaggaggaggttagcaagaaaatgctcttaactgtgagcaagtggattttggaatagccaaacataattgagatgatgtaggtcacaatgattttaagaattgaatgggagtggaataaaatttaccccacaattacatactttgcttcttcattgcttgacggttatcatcaaactaactattcttcaattcctttggcaaggagtggaatctggactctggcaccagagggtcgatttccttccagttctcctttctattttttttttgcttttgtttctttactttgaactcctcacagtcttggaaaaaagagggcttgcagagactttttcattttgtttttatattgcccaaattgtactcacatggatagagtagtaccatttaattgtttccctctaaatatgcacagttcccagaggtattttaatcagatagctttatgccctgttgtttgcagtttccaactttttgttttctattactttctgtttatttagaatgttgctgcctcttcttttcttctctccattttctccctgtcttcatttgctcaccacccatcttggatcaacctctaatatgaatattcaaaatagttgagtaagtcaagttctgtctctgaaaatctcttgactaaaaaaacagattaaaaaataatatcactgacccttttagaggctgagctctgtttcagaaaacattaaggaatgccttcaacattttctcttgtttagttgcatcatttacttgagtccactgggatgattggcattcacgatgtgtgggctggagaccatcaaaaggaaatgttttgtgtggaaatggaatttactctgtgtgtggcagtttgaataagttccctttctctttggctaaagcatctttaccaagcccaatctaatgcattagtcacagaacttaaatagaaaacaacaaagcttccaggcacattgaggatttcttcgttcctttgtctttttgatgaagtccctcagttctttcatttccaaaataaagaagcaagcctagtcgacagacaaaattaaatgaacctaaagaggctaaggacattagttgtttatgtgttcatattagtttctggaagaactaactagataatagatcagtcaggccagttaaactaatttcttgattatttcaaatttaaagactgataataaatgttggtttgaccttaacagactctcttatttaaggaggtcaccactttacaggcacttttaaattctttattatttacaaaccagactaatatggcaaaaagaaaacagaatgttaaggaacactgaagagggtatgagcagacaagaaattcaaatgtgaaatagaaacactaagaagaaagtagtaacaatacgaaagatccaatttgcaggaatttgattatctacttggttcctgggtactatggtgaatgtaatattggcaatgataaataatacctaaaattaaatagctttatatatgtaagattaacaaggagaaatgagttctccaggatacccaatgtattagtaactcaaccagttttttctgggttttatcatgtcctattacccagtctatgctttattgccatagtatatggcttctcaacataatacttggcatataatagggatttaaacgtttctgactgaatgttcctagtaagtgaattaggtgtgtgtatcctttattggaatttaacaaaacaacactttggcctctcaatttcctgagctcctcacttctggtgacctttctctattctatcctagaatttatctttagcaattactgtgctcactctaaatctcaattttaagcactcagtttcacacatatcacattctgatgaccacctccttctttccacacacttctttcatgaccctatggcaacagttctttgacactgctaagcctgcttttctgtttattgttgccccctctttcagtacttttccctcttcattttctcacatccatctctaacttagattccatagtaaaagatagtaatcactgtctttcctgtgcttcacctaccctggctaactcttcttccatcatcttcttccagtaaaacttggatctcacttgtattccattctcagactgctccattcttttgaacagctggatatggctagagtaaaatgccactatgttgacggtctttaccttgattttgtaaccataagacttaaatgttacctcaacacttcctagaaatcttattacataaccctggtccattcactctcctgctcttcaagacaaccattttataccttctttctcactgccaagcccaccacctttcattttcacctcacatcttgcttcatatatagaaatgatgaaaagagaacgttggtaccttacaaatctcccaatcttttcacatctgaatctattaattgtatccttttgaatgaataaattgcccctgttcttatctaaagtcattattttttgttttctgtcagttttttaaaagctcttttattgaagtataacacatgtacagaaaaaatacacaattcacaaatttacagctcaataaattttacaaagtgtaaacattcatggatccatcatccacatcaacatataaaagggtcttatcacagaaacctcccttatattcctgccccttttataatccccacaaaagtataaaaaaatcctaatttccattgccataaatttgtcttatttttaagctttaagaaaaatggaataatacagtgtaaaaccttttatgtctgccttctttaattcaacattgtatctgtgagacccatccatatttatagagcactttgtttctcattgttttatattttatatataaaatacgtttatatattttatatataaaatacgtttatatatttatatttttatatataaaatacgtttctatatttatatattttatatataaaatacgtttctatatttatatattttatatataaaatacgtttctatatttatatattttatatataaaatacgtttctatatttatatattttatatataaaatacgtttctatatttattttatatataaaatacgtttctatatttatatattttatatataaaatatgtttctatatatattttatatataaaatacatttctatatttatatattttatatataaaatacgtttatatatttatatattttatatatgctttatattttatatactttactgtagatgaaatttaggtgacttccagcttagaatcattataaataattttactttaaatatgttatacttatcttttggtgtatatttgtaagaatttctgttgatacatacataggagtgtgattgcttggtcatgagttctgcaaatgttctgcttaattgacaatgccaaacaattttacaatttaaactcccactagcagtatataggagttcctattgtccacatccttaccaacacttggtattgtgagcctttttcatttttgccagtctggttggagtagggtgttatatcataatatttttaacttgcatttttctaatgaccagtgagtgagatcaatcatgttttaatatgcatattatcgtttacatcaactatatatataaatttttcattgtcttgttttttaataaaatttttagagatcattgaatattcacatgcagttctaagaaatcatatagtgagatcccttgtagtctctctattctgttccattagtctatttttctattcttgcaatatgacactaagcacactatcttaattactgtgacttttcagtaactattgatatctagtagtatacatgcttcaactttgattttttgcctgcagaaatttcttccacattctaagtcctttgtatttccatataaattttagaatgggcttgtttatttctactaagaaatctgcttgaatttcaatggggattgcaatttgtaaggaaaatttacactttaagaggactgagtcttctaattgaggaatgtggcatatctctgaatatatttaggtcttatttaatttctttcatcaagattttctaatttgtaatatagaagttttcattgccttctctcatatttctagttattttggtttttgatgatatatatatatgtagtatttaattttcattttaattttctcttgttgacttatagagatacaattttgtatgccactagcaaatgaccctcactcccgaatacaataattctctgtatttcttttttaatagtttaatgcacagttatctgtgggttatgtttagtgatattctgggagactgaatggaataatatacctgtcaagcccactaactggccttcttccttctttaagtactttcactcccagtagaagtatatcctgctctgtattcacctcctggatgatcatttcatcatttataactgtctactttgttatttctatattagtaccttaagcaaatagcctcctttatatactaaaactaatataaagcattatgaatgcatacactgttactagtctggatagagatctagttcattatccattatacattccactgacagaagtagaaagaatataggaagaactgaacagtaggggtccaggtaggagtccatcctttccatgccctagtagggacactcgacgctcaaggaaaatatctcaagatctcctcctctctgtgcatggtctctcatcccttgagtgacatgatgacatataaaacattcttagaatttcacttgaggcagatattactaattaattaatcaaagcaagcatgtgaaatggtatcaatttgccaaaccaggttcagacattgtgcctcaattcagaaataatagaattatgcaaatctaaaaatgtgaccctcaaaagtgtggaatacctctgcttgaggtaataccgctcctctccttcagctactcactcaactctgacaaatcgtaactcagtttactccctatatccccaagctttctttgttaaaagaaattttgaactacttgcttttgaaagtaactcacatggcatgctcttagcatcatctagcacaagctttgttttcttctgttcaacttcctttcagaggtgcatttttacaacttccctctattgttctcattgactttccgggtttgatgcgacctgaaaaactctcctttctgaaattcgttaaccagcttcatcagttttatagcaaggactggaagcaccaatttaaaatttaaatggtacaatgataacttcaaattagtttgatcaattattttaggaaattccaaaaactgaaatttcaaatattgaaatgcaggaacttccttgcccctccctggctctataaataattaaaataaaaagtttcctcacaggaaatatataaaatatgtttgttttgttttgctttagtggaggaaaagagtgtaaatctagaactaataatttggggttttctttgtttgtttccacagaaataatcaatgattccacactaatagaaaccatttgtcccaactgaaataggcaaaaacacggttctgttccaattttacaatttttttttgtttcttcacacaacaccgtggtgatgcagtgtctagactttttggaacaaggcatggagtctggaatttattctgtgggtttgaaaatggttattcagtgctcctacacattcacatgtgaaaatctaatgatttcataataggtaaaaaccatcaagctgtttaccaaatacatatatattcattaatgctataagttcaagctgctacttatagcattggtgaatatacaaggaaatattgtatggattaatatatgtcatctcattgtgccgtggtccccattaacccctatatctgaaatatgcaaaataaaaaacttgtgttcatgaaataattattgcagatattttctagcttttgtgaggctctagtaaaaaaaaaaaagcttaagaatatacatctattcttgtggtttcaataagtaatctgtgagaatttatcaagttaaaagggcagaattgatatcacaggtcgttctcttagtcctctgccatttattagctggataaaatgaaagcagtctctgaggcacccagatttaaccagtgtttgtgcaggctgtattattaagtctgactgtagttcatctgtgctctgaagaaaatcaaactatgtgcttgcagagaaagttcagagttatttgtcaccaattacctaaagctgggagttgagcttacacatagctatggccaattcctgtaaatacttgttcctaatttcacaagactgtcacttcctgaggatttaccttagaaagtgtatgtctaccacagaagaactgtaatacaaaaatgtttacccagagataatagtcttaagggacataaaactccatagcattgattagtttaaaataacctgttcttaattttcaaacaagtatttcaagttctgttaggttttctgtgacaaaaaaaaagcaagcagaaagattttttttcattaaaagatacacacacatacaacacattgaactgagctaatctcaattatactattaaatctctactggttattttaagaaaagaaacataaaagtaagttaccaagtatttaaggtagctcgcctggaagaaaattaggttgtctgaatataaagtgaaggttaaaaaaaatggaaaaaacaaaaaaaaactaaaattatcaatcaatggcatgtttctatatttcttacttaaattattaaaggccattaaaacaagttaatacctatattacataaaaatgatcagaaggaagatcttaagaccttatttacttcaaaaataatgaagtagactgaaaagtgtgctgaatactaggtcagaagaactgggggctgggcgtgggggctcacacctgtaatctcagcattttgggaggcagaggccagaggatacttgaggccagaagttcaagaccagtctgggcaagaccctgtctctacaaaaataaaagtaaaaaagcatatctaggcatggtggtgcatgcatgtagtcccagctacttgggagggtgaggcgggaggatcacttgagcccaggagtttgaggttacagtgagctatgattgtaccactgtactccagcctgggccacatgagcaagactgcctctaaaacaaaaagaaacgagaaggaaagaaacaacaacaacaacaacaacaacaatgacaaaactggagtttatcctcgttatataagaacctatatttctccatctgtaaaataggtaaagcattttgcttgactcagtgttgctctgaagagaagttgattgtgaattgcatgacaggcagttcagttttggtcatgttgacaactttattgaatgtcatgaaagaagtaaagatactctgattcagttttactaaaacaaaatgcagatggagttttaaataagtgtcatttgaagaagtttagctaagattcacctaaaatgctactttattattaagttctgggatacatgtgcaggtttgttacataggtatacacgtgccatggtggtttgctgcatccatcaacccgtcatctacattaggtatttctcctaatgctatcccttccctagccccccaccacctgacaggctgcagtgtgtgatgttcccctccctgggctcatgtgttctcattgttcaactcccacttatgagtgagaatatgcagtgtttggttttctgttcctgtgttagtttgctgagaatgatggtttccagctttatccatgtccctgcaaaggacatgaactcattctttttatggctgcatagtattccatggtgtatatgtgccacattttctttatccagtctatcattgaagggcgtttgggttggttccaagtctttgctattgtgaacagtgctgcaataaacatatgtgtgcatgtgtctttacagtagaaagatttataatcctttaggtatatacccagtaatgggattgctgggtcaaattgtatttctggttctagatccctgaggaattgccacactgtcttccgcaatggtagaactaatttacacttccatcaacagtgtaaagtgttcctatttctccacatcctctctagcatctgttgtttcatgagttgttaatgatccccagtctaactggtgtgagatggtatgtcactgtggttttgatttgcatttctctaatgatcagtgatgatgagcttttttttcatatgtttgttggccacacaaatgtcttcttttgagaagtgtctgttcatatccttcacccactttttgataaggttgtctttctcttgtaaatgtgtgtaagttacttgtagattctggatattagccctttgtcagatggatagactgcaaaaatttgctcgcattctgtaggtcgcgtgttcactctgatgatagtttcttttgctgtgcagaaactctttagtttaattagattccatttgtcaattttggcttttgttgccattgcttttggtgttttagtcttgaagtctttgcctatgcctatgtcctggatgatactgcctaggttttcttctaaggtttttaaggttttatgtcttacatttaagtctttaatccatcttgagttaatttttgtataaggtgtaaggagggggtccagtttcagttttctgcctatggctagccagttttcctaacaccacttattaaatagggaatcctttccccattgcttgtttttgtcaggtttgtcgaagatagatggttgtagatgtatggcatatttctgaggcctctgttcttttcccttggtctatgtatctgttttggtaccagtactgtgctgttttggttactgtagccttatagtatagtttgaagtcaggtattgtgatgcctccagctttgttctttttgcttaggattgtcttggctatgcaggctctttttttgttctatatgaaatttaaagtagttttttctaattctgtgaagaaagtcagtggtagcttaatgggaatagcattgaatctataaattactttgggcaatatggctattttcatgatattgattcttcctatccatgagcatggaatgtttttttccatttgtttttgtcctctcttatttccttgagcagtggttcatagttctccttgaaatgatccttcacatcccttgtcagttgtattcctaggtattttattctctttgtagcaattgtgaataggagttcactcatgatttggctctctgtctattattggtgtatagaaatgcttgtgattttttcacattgattttgtatcctgagactgtgctgaagttgctcaacagcttaaggagattttgggctgagacggtggggttttctaaatatacaatcatgtcatctgcaaacagagacaattggacttcctctcttcctatttgaatgccatttatttctttctcttgcctgattgacctggccagaacttccaatactatgttgaataggagtggtgagagagggcatccttgtcttgtgcttgttttcaaagggagtgcttccagcttttgcccattcagtatgacattgagtgtaggtttgtcataaatagctcttattattttgatacgttccatcaatatctagtttattgagggtttttagcatgaagggctattgaattttgttgaaggccttttctgcatctatcgagataatcatgtggtttttgtcattggtcctgtttatgtgatggactacatttattgatttctatatgttgaagcagccttgcatcccagggatgtagctgatttgatcataatgataagctttttgatgtgctgctggattcagtttgccagtattttattgaggatttttgcattgatgttcatcagggatattggcctgaaattttctttgtgtgtgtctctgccaggttttggtatcggggtgatgccggcctcataaaatgagttagggaggattccctctttttctattgtttggaatagtttcagaaggaatggtaccagctcctctttgtacctctggtagaattcggccatgaatccatctgctcctgggctttttttgttggtaggctatcaattactgcctcagtttcagaacttgttattggtctattcagggattcgacttcttcctggtttagtcttgggagggtgtatgtgtccagtagtttatccatttcttctagattttctagtttatttgcatagaggtgtttatagtattatctgattgtagtttgtgtttctgtgagatcagtggtgatatcccctttattattttttatggtgtctatatgattcttctctgttttcttattagtctggctaatagtctattttgttaatcttttcaaaaaaccagctcctggattcattgattttttgaagggtttttaatgtctctatctccttcagttctgctctcatcttatttatttcttgtcttctgctagctttttaatttgtttgctcttgcttctctagttctttcaattgtgacgttagggtgtcgattttagatctttcctgctttctccagtgggcatttagtgctatcaatttccctctaaacactgctttagctgtgtcccagagattctggtacgttgtgtctgttctcattggttcaaagaagttacttatttctgccttcatttcattatttacccagtagtcattcaggagaaggttgttcattttccacgtagttgtgcagttttgagtgagtttcttcatcctgagttctaatttgattgcactgtggtctgagagactgtttgttttgatttccattcttttgcatttgctgaggagtgttccaattatgtggtcaattttagagtaagtgagatgtggtgctgagaagaatgtatattctgttgatttggtgtggagagttctgtagatgtctattaggtctacttggtccagagctgagttcaagtcctgaatatccttgttaattttctgtctcattgatctgtctaatattgacagtggagtattaaagtgtcccgctattatggtgtgggagtctaagtctctttgtaggtctctaagaacttgctttagtaatctgggtgctcatgtattgggtgcatatatatttaggataattagctcttcttgttgtattgatccctttaccactatgtaatgcccttctttgtctttttttatctttgttgttttaaagtctgttttatcagagactaggattgcaacccccgcccccttttttttttttgctttctatttgcttggtaaacattcctccattcctttattttgagcctatgtgtgtctttgcatgtgagatgggtctcctgaatacagcacaccaatgggtcttactctttatccaatttgccagtctgtgtcttttaattggggcatttagctcatttacatttaaggttaatatggttatgtgtgaatttgatcctgtcattatgatgctagctggttattttgcccattagttgatgcagttttttcatagtgtccatggtctttacaatttgatatatttttgcagtggctggtgccagtttttcctttccatatttagtatttccttcaggagctcttgtaaggcaggctcggtggtgatgaaatctctcagcatttgcttgtctgtaaaggattttatttctcctttgcttatgaagcttagtttggctggatatgaaattctgggtagaaaattcttttaagaacgttgaatatttgccaccattctcttctggcttgtagggtttcttcagagagatccactgttagtctgatgggcttccctttgtggataacatgacctttctttctggctgcccttaacattttttctttcatttcaaccttggtgaatctgatgaatatgtgtcttggggttgctcttcttgaggagtatattgtggtgttctctgtatttcctgaatttgaatgttggcctgtcttgctaggttggggaagttctcctggataatatcctgaagagcgttttccaacttggttccattctccctgtcactttccagtacaccagtcaaacgtaggtttggtcttttcacatactcccatatttcttggaggctttgttcattctttttcattcttttttctctaatcttgtcttcatgctttatttcattaagttgatcttcaatctctcatatcctttcttccacttgatcaatttggctaatgatacttgtctatgcttcatgaagttctcatgctgtgtttttcagctccatcaggtcatatatgttcttttttaaacgggttattctagtcagcaattcctctagccttttttcaagtttcttagcttcctttcattgggttagaacatgctcctttagctcagaggagtttgctattactcaccttctgaagcccacttctgtcaattcatcaaactcattctctgtccagttttgttctctcactggcgagaagttgtgatcctttcaaggagaagaggcattctggtttttggaattttcagcctttttgcactggttttttctcatcttcatggatttatctacctttagtctttgatgctggtgaccttcagatgggttttttgtatggatgtcctttttgttgatgttgacgctattcctttctgttagttttccttctaacagtcaagcccctctgctgcaggtctgctggagtttgctggaggtccactccagaccctctttgcctgggtatgaccagcagaggctgcagaacagcaaatattgctgcctgttccttcctctggaagcttcgtcccagaggggcacccaccagatgcctgtatgaggtgtctgccagtcaggaggcatgagggtcaggggcccacttgaggaggcagtctgtcagggacccacttgagggacccacttgaggaggcaaagctcaagcgctgtgctggaagatctgctgctctcttcagagccagcaggcaggaacatttgtctgctgaagctgcgcccacagccactcatacccacaggtgctctgtcccagggagatgggtgttttatctacaacccctaactggggctgctgcctttctttcagagatgccctgcccagagatgaggaatctagaaaggcagtctgactatagtggctttgccacccagtttgaacatctcagcagctttgtttacactgtgaggggaaaacagcctgctcaagcctcagtaagggcagacacccctccccacaccaagcgccagcatcccaagtggacttcagactgctgtgctggcagcaagaatttcatgccagtggatcttagcttgctgggctccgtagaggtggcaccctggcttcagccccttttccaagggagtgaatggtttgtctcactggcattccaggtgccactggggtatgaaaaaaaaaagctgcatctagcagcccaaatagctgcccggttttgtgcttgaaacccagggccctagtggtgtaggcacccaagagaatctcctgttttgccagttgtgaagactgtgagaaaaggcatagtatctgggccagaatgcatgttccttaccgcacagtccctcacggcttcccttggctaggagagggagttatccaaccccttgtgcttcccaggtgaggcgataccctacgctgcttcggctcaccctccttgggctgcacccactatctaaccaatcccaatgagatgagccaggtacctcagttggaaatgcagaagtcacccgccttctgcattgatcttgctgggagatgcagaccagagctgttcctattcatccgtcttgccaactacccccaatgcttattaaccatactacctaggaactccagtttggcaaggaaagtctaaataatggaatagatactcatgtgaactagtgaacattgctgtatatggccacaagtcatgtttctaatgacctctaattcacagaatttcttcttagagatgtagagagtggagtggggatggaccagagtagtattctacagagggtgccagtgacatcctcttatgcaaaggatacacatactaacttactgggcaagttgcaaagtttagaattactaactttagaataggaaatactcaaataggtaaggatttgtccttttactagtatatagtaaaccttggaaacccatgaccaaagggcagaacatgagccacaaatctatcaattctgaacttaattaaattcatggttgataaaaatatattctcacttgctataaatctgctagatttttgagattcaattaaagaaacattttccagaatatatttcttagagtagtagttttaagcaaaactaattaatgataccaaaatcaaaacaaaagttttagaaatactagtttatcacctttaataggcttcttctgtaaaacacgatttctcagtttaatcatatgtcaatatcaagaagaggatatatcaggcagcattgctgaaatacattggaacacagaaagctttactctcagtatagctagtgttccaaggaatatattgtaaaaagggctaaattaaaggatatttagaacctatatagcagaggcaaattacctatctgaaatgtccagggaactgttatctacaacatactctatagagtaatcttgttgaaaaggcagatgctggctgggcacagtagctcacacctgtaatcctagcactctgggaggctgaggcaggtggatcacttgaggccaagagttcaggaccagcttggccaatatggcaaaaccctgtctctactaaaaatacaaaaattaaccaggtgtggtggcacacacctgtactctcagctactggggaagctgaggcatgagaatcgcttgaaccctggaggcagagcttgcagtgagccaagatcacgcccctgcactccattctgggcaacagaatgaaacccagtttgaaaagaggaggaaaacaacaacaacaaagaaaaagaaaagatggactagtgttcagatgctttccttgattcagaatcagcatgcctcttaaatactgaatatactaagatacacaaaacagtaatttagctttttcatattgatacatgaacttagtatttgatctcagcaaatttagtaaaataatcaggagcttttgatttgccacaaaaaatcattcctctaaactttatgaattgagaaaacttgtctttatttgatgattccagttttgatgttttgtgttattggtgaagttcagaaactcagaaacatagttgattccatagaaaattcaattcttgaagagtagaactttgaaggtgcaggatgaatatgtgtgttatgaatatgggtcatactttatgcttatgtaactgaacatgtagttttactggggctccctttcttcattgcaaaaatacaacttatcctcaatacataatttattgactactacaacttagcaaaaaatgatttggcttcattattcatcccgataagaaaaatctggtgaattaaaggtattggaaaggaaattttaacactgatatgagaatgaaatgggagaagggaacaatagagacttcaatattatctgtaatactccatttttttatatttaaaaaagtgatgcaaaaatgaaaaaatgacatttgccaataatgccaatgtatcacataactattacattactttgctgcttttttaaattcaaaaaataaatattactaaccatttatatgatcattcattcaacaagtacttgttgagagcctactatgtgataggtgctagcaataaaagagagtaaaaaagagacatcatccccaactctcctggagtttgtgtttagatgtgaaatgtgaaatgtttgagatcttatttagaatagaatgtgtaaaaggacaaagtgaggaaatgggggtgaattaactcatattgataattaagaggtagggctactgtgggtacttaatcagcaagcaaaggcctttcaatacagagaggagctgccttatttttagtgaaaattgagctgggaaaaaatacacactggctatgggccccatagctaaagcagtctcctgtggtatttaataattttctcactggttgcagctcaaagttcacatgcatttttctttgattctctctagtatatgactgctgctgctcctatgcaagggacctacattcctcagtacacgcctgtgcctccgacagctgtttctattgaagtaagtctacccctgtctaataaagaggttagaagaaataaatctcagtcacatatactgtagtcccccataaccataggaatcctcacttgcaatttttgtgctactctaaaatatgacattgtaaattcagtgtatgaaagtataaacatttacttgaatgtggctgtgttttgctttgcacatgaaatgagctcatctgctatggaggcacgacgggagtctctttcatatttagagaaaattccagaggccaaatcacaactccatcaaattttaatcacaaatacttcttataaaaggaaaaaagtttgcaactatgtgaatgaactaattctctaatgccttgttcctcaaagagtggttcctagaccagcatcattggtatcccttgagagcttgttagaaatgcagacttgctgggcatgatggcatgcacctgtaatccttgctacttgagatgctgagacaggaggatctcttgagaccagaagttcgagaccagcctgggtcaaacagtcaaacagtgagaccctgtcagaaggaagatcagaaggaagaaaaggaaaaaaaaagaaatgtagacttttaggtactatccagacctactgcatctgaatttgcattttaagatgatcactcagtgatccaaatgcacattaaaatttgagagacactggactaatgcactggttctcaaattttctgcacatttgaattattttgagagctttaaaaatattgattcctgagtcctatccccagagattatgatttatttgtctggagtatagactgaacatcatatttttaaaagatcttagatgattctaatacgtaccaaagactagaaaccattgctctaggccatgaacctgcacaggtttacagcttcttacagacaagaaagaagttgtacaactcttattgctgtagatatcatgaatgatgatgtcagcttgtccttaatggaagctttgctgctttcattctctctttccattgggataaatctatgccctctacacatcattttactggacagggccataaactacatagaaatggagagggcatagagctatgcagatggtggtaaaacacttaggtacctatattcttctttctggttctagccattactgttttattgcccttctttcccctctcctgatgcacaggtgcattatggtcaccgtgcattccttctcagcagctgggaatcccctgcagctgatgtctttgctactccatttgttggcaagcaactactgtgttggtaccactccacataaaaattcaccaagactcccaatctctgagattgagggaaacctttacggactaaattggatcttctaaaatgtttcctggttttggtgtgtgacaaatgtttgttcataccaaggtttaggaaatccagatgtttaacagggcactgatggaaatcaaggagttccaatgtttaaatctttcatgtgttctagacctataggtctcaaagaatgtgtcatcttaaacagttttaattgtcttttcagaattgcaagaatatatgattaaatttcatgttctttggtatatttagctttcaaaaagcacctatgcgataagaaaattaaaaatctggacattctaggcagtttaagtgtaaacttctgccacatattttcatttctctgtgtacaccaaagacaaatacttatctacaaaatttgaccattttgatgattattatgagacatttgacagcgtggcttattggaaacagtctaattatatttagggattaaaagaaatatttcattgataaaaatataaatatactctgatatattgccttgaaccagtgattataaggaaaagcattaattcattctctatgtgaaaacactcattgaacatttatcaatatctataaaggtgggaggtttcaaaaaataaataataccaaatagtaaattaggaaagaaaagattgaatagagagacttttcaaattctaaagaagaaatttagggaatttcagcgacagaattaaccaagaacttctgaaatttgacatcactgcaggtatccaggactacaaataaaaccaggaaaatttatcaggataggtgctcttcttaggcctactaacaaccaaataaaatcacctatgcctctctggattccaaaaatatattcctgattgtgaccaattccggaaatccactcttgccagcatctgtgagaaacaaaaaaaaaaaaaaaaaaaaaaatagggtgaaggaaaagcaaaccaaaattaaggacaagttttgttgttgttttcttaaaacttcttgatgactttcagttcatataccagaaaacaaaacaaatcaaatcaaattactggagagaaaaatctacttaatagcatcctttaaaagatttccaaactttgatgtatatttttattaaggtcactttccattgttatcccaaatggtatagacatgatacagtgaaatatgccaggaaaatgtttggacatacaagtttgtataggaatcctgaatgaggataaattggcatttattgtggataaatgtgcaaacctggtttaaaagttccaagtataggcaaaattattttctgaccacttaactactccaacaacttctaatggcaaggcttcttggtgtcacattaggatgaattacttagcccttatctaaatgtgctctctgggtttcctctgagtacttattgtgacttcatgtagctgagggtatctctacttaagccaaatagaagaggggtacttacagcctatctagagagggcccttcactgaagcaagtaaggcttttatgttcttatttgcctccttagggtgttgttgctgatacctctccccagacagtggcaccttcatcccaggacaccagtggtcagcagcaacagatagcagtggacacatccaacgaacatgcacctgcatattcttaccaacagtctaagtaagtctgggctgtgctaagctcttttcctcaagatcagccatcttgacatcactctctcatgttgtatgtgttagcttttgctgaaatataaaccatcccaaacttagcaacaggcatttatttagctcatgattatgtgggtttgaaatttgggctaactttgggtggatggttcttctgatcttgacaggaatcaaacatctaggaacagctgctgattatctatgcatctctgcttctgggtgttgctagctgttggatgtgtgatggaagtgactaggccatatgtttctgatcctccagcaggctaattcacatggaagtctcagaatttcaagaatagtaaagagcaagcccaaatgtacaagcactcttaattctgtttattactaattttctactgtctcattagccaaagcaagtcacttggccaaacagtcaatgtagcagttcactttgaaaaagcttgatatagagagaggcactgcagccattaaaaaaaaaagctaccatatttattattggaaaaattataatattcctacctgaaactgaatagagtctcagtctcctcactcttaaaggaagacagtaacactcccccttgtagggttactttgaatacacagttaaatgtcgatgaaaaagggtattgtaagatatgaagcaatataaaatatggtcttattcaggaataaaatggcaaggattttcagaattactcttgaaaatccttaaatcactcataatgcaaagtacatttggctttgtgttgagtaaacatttggcaaactttggtaaagtttgagggctgtttattgaaaccaaaagaatttagaaaagtaaagtcttcatacaagtgtcttggcatgcaaactattcaactttgtagatagcaataaaatccctgatgaatagagaatcccccgacaatcctgcctgtctacagagtgctgctccgttatttaaaataatttttcttattaaagaaaaaaaatattctgatatttgttaaaacattaagaaataatttatttattaggttggtacaaaagtaattgcggtttttgccattaaaaaccataggtattaggccgggcgcagtggctcacgcctgtaatcccagcactatgggaggccgaggcgggcggatcacgaggtcaggagatagagaccatcctggctaacacggtgaaaccccgtctctactaaaaatacaaaaaacttagctgggcatggtggcgggtgcctgtagtcccacctactctggggtcggggtggggggctgaggcaggagaatggcgtgaacccgggaggcggagcagcttgcggtgagcagagattgtgccactgcactccagcctgggtgacagagcaagactccgtctcaaaaaaaaagaactataggtattaaaattattgcaataggggaagagagagcatgctcagttcagaacacagcaaagacagctggggatctgtagccaacaagccgagtgagggggtcagtgagtggggaattactgctaacctaaattgacaggatttttgctgaaggcagatcaaggaatgataagatcaaatgtaggggatgagaaaattgatcagatattgagggtggtcatatcaacgataggctattctctttaaactgacttagcaagattcttgctaaaactaggctataaagaactggcaagaatgggggcaaaagtctacgcctactcaagaaggggactcagtagcctgactaaaagttgagcaagaagagaatctgtcactttttaacttcagtatacattaagagatttgtttgttagattcatcaaagcagtaaactctattatgtgtggtttaggtctaaagtcagttttacaaattaaatttgctcagaatatgacttaaacttacaaatgtaaggtattattatgattgccattattaatagcaataatgactttcagaaaagattgttactgagtaaagccatatgttattgttaatttaattgacatagcctgtgtgaatcacttttatgtgcaaaactaatactgtggtagactctgaaactccagtccaagcatattgaaattttttttcagcctggtcaacgggttatatgtggggaaaggagcagatattggctatgtataaagcatagcaagagacattgattggtgggagatgagaaatactgtgggtaatgggaaattttatgtgaccatttgactgagccacagggtacccatatatttggcaaaacaatatttctgggtatgtctgtgagggtgattttggatgaggttaatatttgaatcagttaaagcagattccaccccccactgtgggaggcttccatccaatcagttagttgaacccctgaatagagcaaaaagattgaacctctcatgaatgaagaagaaggaactcctgttacttgactgctagagctaggacattggtcttttcctgcctttgaacttaaacaaaaatattggttcttcttagatcttgagcctgccagctatagaactagaatttacatcaactctttcagttctcagactttcagactcaaactagaattacactgttggctctcctgggtctccagtctgccagctgcagatcattgtagatcatgggacttctcaatcttaataattgtgcaagtcaatttcttattttaaaaaatctctgtatcggggggaggaaccaagatggccgaataggaacagctccagtctacagctcccagtgtgagcgacgcagaagatgggtgatttctgcatttccatctgatgtaccgggttcatctcactagggagtgccagactgggcgcaggtcagtgggtgcatgcaccgtgcgcaagccgaagcagggcgaggcattgcctcacttgggaagcgcaaggggtcagggagttccctttctgagtcaaagaaaggggtgacggacggcacctggaaaatcgggtcactcccacccaaatactgcacttttcccacgggcttaaaaaatggcgcaccacaagattatatcccgcacctggctcggagggtcctacccccacggagtctcgctgattgctagcacagcagtctgagatcaaactgcaaggcggcagtgaggctgggggaggggcacccgccattgcccaggcttgattaggtaaacaaagcatcccggaagctccaactgggtggagcccaccacagctcaaggaggcctgcctgcctctgtaggctccacctctggggacagggcacagacaaacaaaaagacagcagtaacctctgcagacttaaatgtctctgtctgacagctttgaagagagcagtggttctcccagcacgcagctggagatctgagaatgggcagactgcctcctcaagtgggtccctgacccccgagcagcctaactgggaggcaccccccagcaggggcacactgacacctcacacggcagggtattccaacagacctgcagctgaggatcctctctgttagaaggaaaactaacaaacagaaaggacatccacaccaaaaacccatctgtacatcaccatcatcaaagaccaaaagtagataaaaccacaaagatggggaaaaaacagaacaggaaaactggaaactctaaaacgcagagtgcctctcctcctccaaaggaacgcagttcctcaccagcaacggaacaaagctggatggagaatgactttgacgagctgagagaagaaggcttcagaagatcaaattactctgagctatgggaggacattcaaaccaaaggcaaagaagtcaaaaactttgaaacaaatttagaagaatgtataactagaataaccaatacagggaagtgcttaaaggagctgatggagctgaaaaccaaggctcaagaactacgtgaagaatgcagaagcctcaggagccgatgcgatcaactggaagaaaggggatcagcaatggaagatgaaatgaagcgagaagggaagtttagagaaaaaagaataaaaagaaatgagcaaagcctccaagaaatatgggactatgtgaaaagaccaaatctacatctgattggtgtacctgaaagtgatggggagaatggaaccaagttggaaaacactctgcaggatattatccaggagaacttcccccatctagcaaggcaggccaacgttcagattcaggaaatacagagaacgccacaaagatactcctcgagaagagcaactccaagacacataattgtcagattcaccaaagttgaaatgaagggaaaaatgttaagggcagccagagagaaaggtcgggttaccctcaaagggaagcccatcagactaacagcggatctctcagcagaaactctactacaagccagaagagagtgggggccaatattcaacattcttaaagaaaagaattttcaatccagaatttcatatccagccaaactaagcttcataagtgaaggagaaataaaatcctttacaaacaagcaagtgttgagagattttgtcaccaccaggcctgccttacaagagctcctaaaggaagcactaaacatggaaaggaacaaccggtaccagccactgcaaaatcatgccaaaatgtaaagaccatcaagactaggaagaaactgcatcaactaatgagcaaaataaccagctaacatcataatgacaggatcaaattcacacataacaatattaactttaaatgtaaatggactaaatgctccaattaaaagacacagactggcaaattggatcaagagtcaagacccatcagtgtgctgtattcaggaaacccatctcacttgcagagacacacataggctcaaaataaaaggatggaagaagatctaccaagccaatggaaaacaaaaaaaggcaggggttgcaatcctagtctctgataaaacagactttaaaccaacaaagatcaaaagagacaaagaaggccattacataatggtaaagggatcaattcaacaagaagagctaactatcctaaatatatatgcacccaatacaggagcaccaagattcataaagcaagtccttagtgacctacaaagagacttagactcccacacattaataatgggagactttaacaccccactgtcaacattagacagatcaacgagacagaaagtcaacaaggatacccaggaattgaactcagctctgcaccaagcggacctaatagacacctacagaactctccaccccaaatcaacagaatatacatttttttcagcaccacaccacacctattccaaaattgaccacatacttggaagtaaagctctcctcagcaaatgtaaaagaacagaaattataacaaactatctctcagaccacagtgcaatcaaactagaactcaggattaagaatctcactcaaaactgctcaactacatggaaactgaacaacctgctcctgaatgactactgggtacataacgaaatgaaggcagaaataaagatgttctttgaaccaacaagaacaaagacacaacataccagaatctctgggacacattcaaagcagtgtgtagagggaaatttatagcactaaatgcccacaagagaaagcaggaaagatctaaaattgacaccctaatatcacaattaaaagaactagaaaagcaagagcaaacacattcaaaagctagcagaaggcaagaaataactaaaatcagagcagaactgagggaaatagagacacaaaaaacccttcaaaaaattaatgaatccaggagctggttttttgaaaagatcaaaaaaattgatagaccgctagcaagactaataaagaaaaaaagagagaagaatcaaatagacgcaataaaaaatgataaaggggatatcaccaccgatcccacagaaatacaaactaccatcagagaatactacaaacacctctacgcaaataaactagaaaatctagaagaaatggataaattcctggacacatacactctctcaagactaaaccaggaagaagttgaatctctgaatagaccaataacaggaactgaaattgtggcaataatcaatagcttaccaaccaaaaagagtccaggatcacatggattcacagccgaattctaccagaggtacaaggaggaactggtaccattccttctgaaactattccaatcaacagaaaaagagggaatcctccctaactcattttatgagggcagcatcattctgataccaaagccgggcagagacacaacaaaaaaagagaatttgagaccgatatccttgatgaacattgatgcaaaaatcctcaataaaatactggcaaaacgaatccagcagcacatcaaaaagcttatccaccatgatcaagtgggcttcatccctgggaggcaaggctggttcaatatacgcaaatcaataaatgtaatccagcatataaacagagccaaagacaaaaaccacatgattatctcaatagatgcagaaaaagcctttgacaaaattcaacaacccttcatgctaaaaactcttaataaattaggtatcgatgggacgtatttcaaaataataagagctatctatgacaaacccacagccaatatcatactgaatgggcaaaaactggaagcattccctttgaaaactggcacaagacagggatgccctctctcaccactcctattcaacattgtgttggaagttctggccagggcaatcagccaggagaaagaaataaagggtattcaattaggaaaagaggaagtcaaattgtccctgtttgcagatgacatgattgtatatctagaaaaccccatcatctcagccccaaatctccttaagctgataagcaacttcagcaaagtctcaggatacaaaatcaatgtacaaaaatcacaagaactcttatacaccaataacagacaaacagccaaatcatgagtgaactcccattcacaattgcttcaaagagaataaaatacctaggaatccaacttacaagagatgtgaaggacctcttcaaggagaactacaaaccactgctcaatgaaataaaagaggatacaaacaaatggaagaacattccatgctcatgggtaggaagaatcaatatcgtgaaattggccatactgcccaaggtaattgatagattcaatgccatccccatcaagctaccaatgactttcttcacagaattggaaaaaactactttaaagttcatatggaaccaaaaaagagcccacatcgccaagtcaatcctaagccaaaagaacaaagctggaggcatcacgctacctgacttcaaactatactacaaggttacagtaaccaaagcagcatggtactggtaccaaaacagagatacagaccaatggaacagaacagagccctcagaaataatgccgcatatctacaactatctaatctttgacaaacctgacaaaaacaagcaatggggaaaggattccctattgaataaatggtgctgggaaaactggctagccatatgtagaaagctgaaactggatcccttccttacaccttatacaaaaattaattcaagatggatggattaaagacttaaatgttagacctaaaaccataaaaactctagaagaaaacctgggcaataccattcaggacataggcatgggcaaggacttcatgtctaaaacaccaaaagcaatggcaacaaaagccaaaattgacaaatgggatctaattaaactaaagagcttctgcacagcaaaagaaactaccatcagagtgaacaggcaacctacagaatgggagaaaattttcgcaacctactcatctgacaaagggctaatatccagaatctacaatgaactcaaactagaaaaaaacaaaaaaccccatcaaaaagtgggcaaagaatatgatcagacacttctcaaaagaagacatttatgcagccacaagacacatgaaaaaatgctcatcatcactggccatcagagaaatgcaaatcaaaaccacaatgagatatcatgttacaccagttagaatggcaatcattaaaaagtcaggaaacaacaggtgctggagaggatgtggagaaataggaacactttgacactgttggtgggactgtaaactagttcaaacattgtagaagtcagtgtggtgattcctcagggatctagaactagaaataccatttgacccagccatcccattactgggtatatacccaaaggattataaatcatgctgctataaaggcacatgcacatgtatgtttatagcggcactattcacaatagcaaagacttggaaccaacctaaatgtccaaatagtctggattaagaaaatgtggcacatatacaccatggaatactatgcagccacaaaaaatgatgagttcatgtcctttgtagggacatggatgaaactggaaaccatcattcccagcaaactatcacaaggacaaaaaaccaaatactgcatgttctcactcataggtgggaattgaacaatgagaacacatggacacaggaaggggaacatcacacaccggggactgttgtggggtggggggagtggggagggataacattaggagatatacctaatgctaaatgatgagttaatgggtgcagcacaccaacatggcacatgtgtacatatgtaacaaacctgcacattgtgcacctgtaccctaaaacttaaagtataataataataaaataataatttaaaaaaagacctaaaaccataaaaaccctagaagaaaatcaggacataggcatgggcaaagacttcatgcctaaaacaccaaaagcaacagcaaaaagaagccaaactagacaaatgggatctaattaaactaaagaacttctgcacagcaaaagaaactatcatcagggtgaacaggcaacgtacagaatgggagaaaatgtttgcaatctacccatctgacaaaggtctaatatccagaatctacaaagaacttgaacaaatttacaagaaaaaaacaaccccatcaaaaagtaaacaaaggatatgaacagacacttctcaaaagaagacatttatgcagccaacaaacatgaaaaaaagctcatcaccactgattatcagagaaatgcaaatcaaaaccacaatgagataccatttcatgccagttagaatggcaatcattaaaaagtcaggaaacaacagatgctggagaggatatggagaaataggaatacttttacactgttggtgggagtgtaaattagttcaaccattgtggaagacagtgtggtgattcctcaaggatctagaaccagaaataccatttgacccagcaatcccattactgggtatatacccaaaggattataaatcattctactataaagacacatgcccacgaatgtttactgtggcactgttcacaatagcaaagagttggaaccaacccaaatgcccattaatgatagacttgataaagaaaatgtggcatatatacaccatggaataccatgcagtcataaaaaggatgagttcatgtcctttgtagggacatggatgaaactggaaaccatcattctcagcaaactaacacaagaacagaaaaccaaacactgcatattctcactcataagtgggagttgaacagtgagaacatggacatcgggggtgggcgcatcacatactggggcctgtcagggagtgggggactaaggaagggataatattaggataaatacctaatgtagttgatgggttgatgggtacagcaaatcaccatggcatgtgtgtatacctatgtaacaaacctgcacgttctgcatatgtatcccagaacttaaagtataataaaaaaaagaaaagaaaaattaaattattaaagaagtctaacagtttcatctacaatttgtaatttagatacctatgtaattctttcaaggacaatttttttaaatattcatggctttctttatgggttccctaaccacttctttaagtttacctgtgagtaatccagtagagggaatatactgtgacatttttccacactctggatcacagaatcccactttttacatagcattacatgaagctagtctgtcaggaattattctggaaaatattgcttcatttggctatctctgagacttcctcctcctctaaaatagatttctaagattatcgtttgttacgttccaatatattcactgtgccttttttttgagggtggaggagtgaggagaggattcaaaatgactctgtattcttaaattcagtgaaattcctactctaccatatttactctgactttagaaggccctcatctcaaccctggtattgcaagttctttttatacttcaaatcttctctggctaactgaactgccatgaataccaaatttctatacattgtcagtatatcaatgatgagcaaattatgtccttcacatttgtgagtaatacaacattctatgtattataatatattgtaataatacattgtatgtgcactgttttaccgtttgcaattgatttccatactcattatttcttcacatgaattcctgttttcaagttatttctttttattttatttcttattttattatttattttatttatttattttatttctaaaatgtccaacttaaaatgttcttgttgccaaagatcccagcctaaaaaaaattaaaacccttctgtttttaggaatttcagtgcaatccataagtattatgtaaatgtgcacattcacatttattctaggacagaggagatcggcaggagtgaattcagttctttgaaatggcaagatcctttttacttcaaacttcagccagcaaatatgaagttgtaaagtactaccatctatttgccatcatttgttttcatgtggcaatgggaccattttaaagaccaagcaaattatgggagagggctattggaaacatttgtgtacagttataaaacctaaagtagttccagcctagctcataaatatatcaatgcttttgagaccagtgaatatcaagtacttgagcttgatgggtcaggtattctatgcactgtagtccactgaataagacatcattcactgagcagctgctaaagagattcatggtgttttaggcatttttggttcagtacacaataataccagagtagaagatgggagtgagaacaaagaacagactctcccccaacacacacacacatacacacacaactatataaccaagaaaaaaaattgttcccttagtaatatagatttttagacataaatggagtaagtctatagtttgcaaagctagagacagttaaaatataaaccatggttcccatgactaccactaataaaattttttcttattgttgctactgtatgaaaattgtaattgctttacttcttagaagatatctcactttctcatataacacagtaatatatttttagggacttaacctattgataaaaattgaatattcgatctctcaactagttgctttcctcacatgattttaggaagaaattaatcaggttcctaattgccgtagctggctcacatgatggctttttgcaaatcaggaaactatgtcctttccaggccatctcaagctaaacaatacacagtttaaaacactgtgaattggggttacagctttcctgcagggtacataccttggggagcagacgatgggctgaaatttagcccccactccctcaatcatacatcttatatagtaaacaatctgtaaaactatacatagtaacactgagtcaaatttactaaattaagcaactgtgcatcagaagaacttgcataactttttgctggcatccaataccctgagcaaagaggccttcagctaaatgtaacttacagagataatatagaggtccttctttctatagcaccactctgaagttattttacaaacttctaatctgtgggcaaaaaagctaagagtaaagtcatcctgctggaaggttaaccttgcaacatagaaggggcagtagcagaagtctttatttgacatgagctaagcaaagtggcatatagtaaaatgatatttttctagttaaacacctattgtgtatataccactctgcctaaagggtaaagggtagaagtaaaatatagttcctgctctcacaaatttataatcttgacagggggaatgaacaagaaagtagagaaggggaagaggaaaagagaataaaactgcattggcctcttaactgtctcacttatttcctcaggcaataagccttatgtaaatgtacgtgatgaataccatgagataacatacaacccagttattttgggtgcatagtaaagaatctcatatttgttgctggaattagtgatgattcctatagtagttttgaaggaacagaattactcaaaggatctgtaaggagctataacataagctattacccttgatttttaatgtaaacaaactctctggcccaaatctgtatttaaatgaaagtggcagaatttgacaatctcatagactcagtatgattttatgatgcttttgtgactatgttacattgaaagcttggtatcttttaaagctgcctcattggaaaagggcacagaaggtgatttcaaagttactttaatttaatgaccactcttattcaattgttttcacagaccataaacaggactgaagaatgtctgtctgaatctttgccttgaatgaagaaacttcattgaacaagaagttggcttccagtttgcacagacgtcaatggaatgcatttttttgttgttgttgttgttttttttttagtgttataccttacccaatgaaagcaaagtttttatgtgctgtgcaaatggtcttcatgtggtctgacaatttatttttgccatcatttttttaattaaagaaaaaatttccagaagaggaaaaaaaaactacaaaaaacaaaacattgaaggttgatattttatgtggaagaacatttgaattgaattcagaatttttctgaaggtgtagatactttttttttttttttaacagaaaacctgatgtcaagaggtgggcaatagaaatggaaacaaattgtcttcctcaataattaagctactttctctttttcccttcttgttttaatctagtgggttttttattttattttttcttagaaatatgtaggtaaggtttatcttgaatcttaattgccttaattttaaggacgtcaaaggctctcgaggcaagctgtcaacgtcttgttgaaaacaaaaatcaagaaagaattgaaatactgtgccggctttcactggcacagaagtttaagactatgagtttttagggtgaagaaaaaactgtacagtttaaatgaaaatgtttttcttcatttgaagaaaatttgttgataaaccatggcaactgcaagaattggaaaaatgctgggacttttcatgaactttgtcttaagtgttgacatgaatcattctaaaaggctaaaacattttacagtaaagttattaaggttggtttaaaaacaactgcattagaaataatgcgtgtttggggggcagaatgcagatttttttaatttacaaagcgtgatcgctagcaaaagcattagtgctttttatctgcagtcttttttatgagctttacaaagtttttagtcagctttgcttgtcacattgcaaaacctagcttaagagcattaaaaaaaaaaacttaagtagataggagcttatggtcaaaaagtgcaaaaaaaaaaacaaaaaaaaagcaatagatagagaaattgttgacaatttctgtagtctttcctagttgtgatcaaattcagcctatggatggcctattttataccaaagatgaagtgacaccctattacagtccagaagatagaggttgttttcgtttcttttctttttaaaaaaaaaaaaatttatttgaccgacatggccggaccagttctttctttgttgtttgtttaaactaccttccactggtgttttacatagtgcaaaaaaaaaaagagggtggggggagttgtctctcttttctttaaatgtgtattcattgatagcagaagcttgtacctgctgtgtttagcagtttcagcatgaagagttctggatatgaactgattcatagagccaagtggctttaaattctgtgagcttttctggtttctcactagctgtcttgaatagtgaaacctgtattgatggccactagtaaaccaagatgcttatttaacaggtggaatattctttatatgaaatttcagctaaagacactttctggacctggtctgaaaggtcatttgtcaaaaaagcttagggatattctgtgaaatggtgagtggtctcctggaaaggtctcattgtatttgaacaatagtcttccctctaaattacaacacctctgggttttgtctttacacctctgtctttgtcatcacctaccatgaatagtcaccttggttttgcaaatggggagggggtatcatctttttgcctgttttcactgtatttttgtatattggtgttgccgaaagaactttttctttcagtttaattctttgaggcatgtaggaccaataagattgagaattctattggtggaatttagggaagtccttaaaatgctagttgacaatcaaggaacagtatgatttatatcaataagaaccaaaagaattaggtttgatcaatcatttaagccaaggaggaatacttgcatttagaacaatgcaaaactttgtctaaaatgaattaaattgacccacctgtaaaatatatctacatttttaattcatgagatgatatgtgttcaacctttacagttttacctgaaattaaggacaatggaatagaatttgttaagtgaaccattcactagattgctttctgaatgaatcctttgaatcaaataggtgaaactcttttcaaaaactaagtcagtcacaggagcctgtcttagtccaaaagaagcagggaaatgtatttaagtgtactataaaacagggtaggctttttaaaaactaaaaagttttaaaggtaaatcatattcccattaggtcaacatgagtaataaggttgactcatgtgaaattgtcaatattctactatttctgtaaactctggttctcttatttgcaaccccatgcactggaagcccaaatcagagaatgactccatatatttatggtcacattggagacaaaagtgtatccaagaaaatgtagtgtgcgttatagagaaattccaactggtcacactcaccattatggtttttcatgctttagagaaaatgctagatttatactgtcttttgttccatccttcagcttcccatgcattataaaggtggcacttaagtttttatctttgaaaagtgggccccaaagttttttggggtacaaaaagacatgtatgagaaccatattttctgtttctctttttcactctctaaactctttttgtataaataaggattatcctgggcataattcatttgaatatgaaaccaacatactttctttcatttttgtgaaaaaataaccaaaaacatgtattaatgtgatacaaagaaagtctcattcacacaatcaacaatgaggctaagaggtagctaccatgtggctaatgaatgtgcctaggtaacttcctgtttctattcaaaactgctgctttatttgtacattcagaaatatttttttcaactatgaaatttcaatatcaattttttaagccagtttctgcaaaaggaaatgacctgtcatttgatgtgttcatgtgtgttttgtgtttggatagtttatatcatgccattctataaaatgtatgttttcaaaccaaaaagaaaaaaaatagaaggaaaacaacggcacatactcaaatttgccctgctttgtctgttgtcttacctaagacttgttttgaagagccaagtctgggagagaaaaaaaagcatcaacaggtaagcagcattacattgtgtggtaataaaccaaaataagttttcaatatatacagacaacagaattcaaatttaatcaacaaaatatattgtagtgatttgtttgtttgtttgtttgagacggagtctcgctctgtcgcccatcctaactaggactataatctttttttttttctttaagttgaagttaattttctgtgcattctggtccaccagattttcaagcatttatttggatgtttccatttttccttttgactttaatagccaagacttagcttaaacatcaggaaacaaactaaagccacaatccaaatgagagaaacactgtctcgtctaaactctagtttcatggtcagtgcaacagtgagttttcttttaataatggtatggtattgtcaagggaggcaaagtgttcatggtaacttggagctccccaatacatggccatgtcttctaaagacaacgtaatgagcccaagtgaactgaaggtcatactggcaggtgctgatgacagtttgtccttgaatgctgacatgtcttgaatattgcaaatgtcataatactcttttaaaacagtcctctacctgactctagttttgcgaggattagtttgtttccttggtagatttcaacatttcagaatgttacctccaaatttcacttgaattacttcctcctgtgaccttagcagatctgtcacatttgaaagcatatgactcacttccacccccttctaatgaaaaactgcatggtgttaaaagcactctcattagaaatataaggctgagaactgaagaaggctgtttaaagcaggaatttcactttattttactatgcctaaaaatacatctttggaccccttgcaaagtgctttaaaagtactttcaatttatgcatgactccaaaaaagtaatttttttttcccaaaaaaacctctttatttaaataattgggatatttgctaaatacctatttttttttacagtggcctaaaacccctattaatgaaaagtgaaatttgatttaattaggactcttgcagtcatcttcacgactgaggagaagtttcaataggctgtctagacattatgatgttaataggagattaaaatacatttggcaattcattttcattcttaatttgagtgcatgaaccactgcagatgagctgataagcagaaattctcaagtgggtttcactaataaatgtttttttatatgatttgaaatcaagtaaagggacaatgtttatgtacgtgtataacaacattcagcacatttgaggaatcacacactataataaagcttaaacctgtcatagaaccttgatctatattactttgtcttcagtaaaaagtgaaggatgagattttgtctttcatgttattgtagctggcatgcttcaaaattttgagcttactgggactgacagcctctcacttcaatctgagggattgacagaatttaaacaggctcattgattctgtacactctacccttcctgtggcaagtgataatgggatttcattaatgaatcaatttgttttacaaatgacatccactgtggcattggaagacagttgggtctgactcaagtttaacatttcttaccaaacattcttaagtatgaaattggtcctttaatccaaatgctcttggtcatggctgtcctttgcggattacatagcattcaggaaagtacaaaaactaaacactaaatccccaactggccccaaagaccttttatgatgtgagagacaagagttcaccccagattaatttcttttatcattggctttatactctaacatatagatactctctatagcaaaaaagggatgaatggctttcaatattcatttctgtttatttttgtgagggaaaataatatatcaagaaaattttcttccacttagaaagctttaaagctgaagtagaggtgcagtcaagcttggatctgcaggaagaaccactaggccactgagtcatacttgagcttttcttactactgccccaatttctaaattgtgcataaatacaatcactctcaatttttgaagggctaattatctactttgtgggtgtgttttgttttttcttttcagcgtgtagggcttgggctctgtttccttttattagcatgtcacctgagggtggaacaaacaattggaaataaaatttgattattttatttcttataaagtattaatttcttaagggggtttgaaatcattggtaaaattaatatcagtacattatatgtcataaattttgattatctataatgtcttttcttatctaccacaaataattgagagttggctaaattcttgcagaatatatgggaaaaaaatcatagcaaagaattcagcttccctcaaaagaaagctatttttgtttccttcactccactaaatttgaaccagtagcacggatcaacacgacttctgcaatgagagtataacggtagctcttggtacagtcatattcatatttttaaatctttctttgaccaaaactattgcattgttttcattacattttgactgcgttacttattaaggccgaatgactttgacacccccgtggattatttttatgatcacatcaaatttaaacaatgtccaaagtgtaactttaatgttatattttgtttcaaaccctctggtctaagattattgagaaagatgttttttcctcctccctcaaatatgttatctcttcatatataaaaaaataagttattccatgcttttcaggaactgtaaaaattatttcaaaaagatatttgaaaaagttttctctattctggacacaaatgcttccatttatttcaaaagaagaagaagaaaaatggaatcttaatttaaaaaaatatatgtagtagtatctgctatgagatattcagtctctataaaaaaaaaaagggacacagcttcttttaaaacccttgtttcagtccatattcaacttcatggaacttctgaaacatcattcaattttgaactttatttaagagcatttttgtactgctgtctctgactgtcatggaaagttctgtaattctaaggtgtttctggttttatttttaatttcttcatctgtaccacagtcaaattagcaaccatctcccccatcccttgggctttctgtagatcagtggatgttaggtttaaacttctgttttctttgatgaagctttcaataaaaaatgaaaataaaatcaattgaatagggctgttgtgtttttctgcactcatccagagactggttgtgggaggagggctgataggaaggagtggtgcccacctttaatctggaacagtgctggaattttttaaataatcatctcagctaacaaaaaatgacagaggagagaatattcaatacatgccaaggggacctgagaaagccactgtttgtgggaatttagaaagagaggaccatttaggtcttcccagggactcccacaatcttcctcattctcaagtttagggatttagagaccacagaactcctgtctccaaacatgcctaacagctaccaactacttgatgaatcttggatgaaggccagttatatttgacacctatggtttgtatccctgcaaggattaaatccaggtcaaccaaaatcagaagtgtccattcctcaagttacagaagactgtgctaagcaaataaaaagaaaacctatttttccagaccagagtaatccaagctagcttggagctcatatttaagagccagtaatatcctgttctgtaatagtcatttgctgtgttgttcaaaaatattccattctactgtagaagacaggaaaacaaagggatacatgaaattcctatgatgtgttaaacaacaaagcgacccttaagacagaaaagctaagtacagcatgtgagtgtgaacaaaaatagaaagggaaagaaagaccaagaaaacactatatgtgatacactagatatatatatatatatgagaaaattaagcattcactattcattaggtcttaatttgctcactctttgttgccttccattctggtacccacagcagctcatcaacctaattggtgaatttcagtggtttgcccctgattgtcttggagggagtaagaatgctccactggctccctctttcattgctcaaaacccaactctggtataacacaccatcactggagaaggatgatgtggcagagggaaaaggagtatatataccaacattgcagaacattcagctagtgtgcttccacccctctcgcactttaacctcaatgagtcaacctaccccatgactttcaccttgtttcttttctgtgtatttaaaattgatttaataagccccgtgcttctagcatctttattggtctgtgagtctttctgttctatgacttctagtataatctgcataacagtgtagttggaagctaccactacatcaaggtgatttcccacatggcatcttcttgctttagaatacatgcacccaggggaggctgtggagaaagctctccaaccggtgcccaggctctaagaatatgttgtgtatataccatttccctttctgaacatcagttcacattgtactggcagaagagaaaactagacgagaaaactggaagaatggatttattggatagtttaagaaagtaagtgtggaacaaagatttttttttttgagacggagtctcgctctgtcgcccaggctggagtgcagtggcgcgatcttggc

SEQ ID NO: 508 - DNA, 292158 bp, Homo sapiens
  source 1..292158: mol_type = genomic DNA
cctttaaaataacattgtccagtggagtctcccagcaaagggattcctagcagcccagcgggtcagactcccaaggctttgcctcccagtccctccatgctgttgtccagataggagttaggtttaaaactcctgacatgtaggacaactgaaatcagcggcactctccgatttttgcaaatagggttcctagaaaagtttgctttccatttcatcaccctgtgacgatccccccatctctcttttccctgtaacctctgcccccaagaggcaagagttcagcttcaaaggaaaagcaagcaagtcaaggccacctcagtcccttctccctggatatcccctctctaaaccgctgcctattctaaaggccaacgacccggtcctgcgatttgtcccgttgtagacctgggaacaggcaggcgggaactgggggctttactgggggatttgaggctggggagggggagggagcaaatgtcatggctggctcgctcaagcatccagggaaccgaagctaagcgcatcctgacgggcttttaaaatgacattgattaggacaagctgttcccaaccccagtaagagttaatctgcctgttaatcaaggcactaaggggctcaatgcgagttttattagcgacaggagaacagaggcggcagccagggatcaaaagccgggatcccatatatttgtcagcgctatctccaaaaaaaaaaaaaaaagtattttcaatttgaaaacaattcggcgcttttcgtcacttcctaacccagtctcacagagggtgacttccaaacctggctagcggggaaaaccgctgcccgggggacagaggggctgacaggaactgcgggttggctcagccgaatgcggccggggagaatttaagaattctcagcccgcgcggcccgatgcctctgattcctcacgagaggaaagggaatgaaaaatgaagcaacaaatgacaccacccaggctggcagccctcgttcccggccagaccccgctcctcaggcccggctctggcgccgggtggcgtccagcccctgcacgcgcggcgcggcccgcgggaaagtttgtgcagcgagagtgactgtccttccgcctcgcgcgcgctgcccccttctgccccggaggggcgttgggttcccttcggttttcctttccaattctaaaataaataaataaactccgggccctggggaaatctgaatagtaattccagtcatccaaattctatgagagggtctgaggaaaaaaagacaagcctatcacgggcgccctccgatcacgaagggcacgggcatgagaaggcgacagaggaggtcctcggctcgccctgggcgcggagcgaggactctggtcagaggtaattatgtcaccgcgttttctcgccgtgacagccgaataaacacgatctccaataaacatctctaatgagggaggaggcccgaggatggctgggtttgatttatgactggaggagaaggtccacttcccactgcgaagcaggcgacctgctcgccgcccagctccagggagaggaacccgcggaggagaggatcccggcccaggtaaggcgtgcggccggactgccactgcgctcgtcccccgtttccaggtgaggtgagcagggggcgccaccgctcggagtcgggcggaggtcccaacacctgtcacaggtgactgagctccgaaggtgctcccagaagacctagaaagggggcgcaggagcgcgagtgggagtgggggttgggggctagccggggcctggcccagaggccgccccaaactcccgggcggggttcttgggtgccccgcctaagccggcctgggcgtctccagctgcttttagggccgggctcccaggactttcgcccggctgaaccacaagttagtctaagtttgggtcgtcccttccctgactcactaaggggacacttccgggccccggctctggccctccaagggccgcagggtggtgggcgcttctctttcccgggcttggcggcccggctcccatggcgcccgcgcgcttcccgccgaggcagccagcgcagcgcccgcagtaaccggagcccgcgttctagctcagtgagaatcgctaattattaggtcttccgaagtgaagctcaaatcacacgctgggagctttacgcgctgcccagctctgtcggccgcattctttcgtactccgcgtctttctgagaaacgaaccccatctctagactttgttgcggtccagccatctgcactttgcaaccgcgggaaacttctgctgcacctcgcccgacccgcggcagggtgtctttaagcgctccaggcgcgggtacggactttcccaagcgtggatgtcgtgaactgcgatgcagaggaggtctggatgcaaagtgcgtccccacctcctgcatttttcgcggtcgcgagtggctttagcagacagcagcagcagactcccgccccctactcccagctcagggccggactggaagtccactcttaggagtggaacattttgctacttttgcagaagagcacactcggcaaagacaagtccctcctccaccccccttcctatccctccctcagtaactcgcttccatctttgtatgcctccttttaaaagcaaaaatcaagccccggggccacttggggcgggctttgatttggggacagcagtcgctggcagcggagaggccccgcgggccccgagccgggccggggccggagcccgggcggttacctgggagcggagggcggggaggcaggtgagcctggcagcgccggttcccacacttctcaccgccgctcggcaggggaagtggcagatctgacagccgcgttctacgcgaggacctgccccagagtttaaatgtcaatgataagaaaagagggtgctcaggcaggcgctaactttccttaatatccacgccagcgccgtcctcattggctgcccggcccgcgtgacgtcatggcggctagagttgggcacagctctgcgccgactagttttccggccgggcgggagcctgcttctccccacccagggtccggccggctccaacccctgctttggccttccttggcccggcctgtgactgctctagcccggcccggtccagcctgggccgccgtcctgtatggcgtagagtcgatccccaggaaactagtcttgccgagtgcgctcctccgcaccttcgggcactagggccccaagatctctgcccttaggctggccagctacctctctgggtaatcaccctgtcccctcctccgatccccaagggagtcccttcatcggagagacccgaaggccgcgccgggatggagaggcgcttttggcaggaatcatttttaggaggagttcgaggctcgatgagtaccctcaacctggccctcgagcccgcaagtcactagctgggcacagacgggggctccgggaagaggacatgcgacccctttttcagggcctaggccaaaggtctctccaggcctgctgggttctcaagagggaagccctaaagggggcctacccgggcttccctcgccctctggctgaaaggctccaaccacattagaaaatgtaggtgattgtatttatctttgactttgaattaactgttgactttgtgacttagaggaggaaaacaggaaaatcccagattctgaagtcaatactcatagaaattggggcggggtctgcaggacactgacttgctggtctgtgcctgtttttccctcacaccttctgtggactgcgagatggcttagcggagctaggcctggctatcttggaatggagatttagaccctcgttgtcattcccgtccctcatccctcaaaacaggaagcttctcaactccttcccctatgcttccatctggctctccaatttgaaagtgacagtggtggggcccggaggggcaggggtcacttgaggagtttgcgggagaggaaggggcggggcgtggaatttcctttaggcagctcgtggagacccagcctgggtggacccgggagtgtgtgtgtagaagcagggagggggacgcctgggccggagagggtcctagggccagtccctgcgcgccttgatccgggcggcggctaagggagagccgagcacagatggcgccgaggcggaggtctagtgattcccgctcccgcccctggcacacctggacaggtgccgggcctcgcaaccggccaggaggcagctccaggcagcccgtctgcccactcctcttagcccggacagctcctagctggacttgattttttgtcttgctcagcccgtcgaggactggagggcagagtaggggtgggagtgggggtaggggtagaggtgggggtggcggtgaaggtggggaggagaatgggagctttggctgagaagtttccgcaggatgttcttacttatttacaaacattctccaaactttctttcttcttcctaacgccctgggcatcctgtgttaaggcctaggagcgcccacctcccactggccactctagtctgggcctagaccttaccatggtcctgtcgccctgctcggctgggaagggatgctaagagaggcatttgttctggtttccctgtcgccgtcggccatctccagtgacctagtttcttggtaagcccctagctcccctccaggacctggcccagcctccagcctcagatgtcctgaggtctcccagactccgccgtccgccttggcgtgtgggctgcggataggcctcggacctgtgtaggccttcctagctggccagtttctgtccgggtctcgctccccacactgtaccaaccctaggccgccgagagggctgttatgggcttgtttggagtccaggccattaagtgtgcgcaaatccctgcaacccagcagggtgctcgagagcgactctggaaacgccacggcccccgcctgcttatctgcctgtcaataaagggcgcgttcgggctgcgcgggagcgccggtggtgcaggcgaggcccgaactaggcccttccgagctccgggccaacgcacgagccgctctccatttgtcccgggcaaggaggctgggagggagggagccggctctggggtcgccgagggagaaggtgcgggtttagccgctgcctcagctggattcttggagaagcgctcgacctcggagcactctggagaccctaccagaaatctagtgctgggggctcctctccgcgcctgccaccagccttggaggaagctgggcagggccccgtgtggtgcccagcctacgaggtcccacctcgcctctccctggcagaggcatcctctctaggccacactggctcgcattgcgggaagaagggcaccgcgggcggcccgggggcatcatcgacgactcgtagagccccaaatgccgagtgctacctgaggcaggctgtagctggggtgaaaaggaccggaagcgggaaagaaacctcttttctttcaggcctcccttcagcccggggtagcacagactgcaaatttccgacacctagggcagctccaggctctgattctccaccgcacagtgagcgagctcggcagccgcccagtctgcgtaggctcccaggccagccccggccccagagcttccccatcagccagcagaggctgggtggagagcctggatgggcgtgagaggccttgaagtaggggaagtagtggagagagagaaagatagagaaatcggctcttggcttgaactgttgttcttgtcgaaggtatgttttcccctcccggcctctgtcgcttttcctctctccccttaactactttatgcaaataaagccgcttccagactggaggagcccctaccgctggatctgtgctaccaggtgggtgggaattgatttagtatttgcctttttattgagaataggcactgagtctcccaccaattataaaataaaaatggattttcctcttaaaatttaattttactcaatctggaagataatgcatcctgttaatttctacaatatttttaaaaaaggattccagggtgagcgctaacttataaaatggtttaataaagcttttccatatacaaattaataggagaggaaaaagcccctaaataattgatttaaaatactgtgtattatttgagtgtcatttcaaatagctgtacaagccagtaatcaatatatcatctaaggaatctaatttactgggcagtacgtgtggctcttgctcttccttccctctccacttcctcccctttaaacagaaaacttgttttaacaagatttttattttaaatcaaaattgaaggaaagttttgtgaattcgagcgtcaaaaaggggactatttagcaaagataatatttgccatctcttcaccccggtctcaaggattgcataatggcatgattatgtgcaattctgtgttttctctgctattaatttattttcctgctctcatttaaataactactttacttttttctctcttctattttgccacaccataaaaagttttcccggacctctgtggaaaatctccaatccttccagttagctttgtcacaaacaaacaaacaaacaaaaaacaaacaaacaaacaaaacaaaacaaaaaactctacaacaatcaatttgagaaaactctgctttttctttccttttaaacattttcatattaagtcagtttgtggcaccatgtttgatttctttctctcccttgtccgggtagagatggagacattagctgaattccctgggggtgattggatgcaattcactgaaagtagacaggcacgtcctggatgttagaaattcactttttctcaacgtgacaaggccggcttcgatctacaattgtatttgaatgggcaatgagcggaaagatctctcatcattaagcttgcttctactttagcaaaataaggagagccttcatttgcacacaaatgctcataaaactcggattccctgcaaccctttaataaaaaaggattgctgcataatttaaattggaggccaggggaaggctgagagagggagatgagggggtttcaactgagtcccctcccttcccccaaaaggtccatgtgatcgagttgacttttttactttaaatcttaaataagatgtgagttgtaacaagaggattggcacttactccgtgacccttataattggattaaatatagactgagacgtacaaaaacacaccaagattgacacctgccaactggacttccttatgattgattgtgatgcttcgtgctggcaacaataatgaaataaattgtacggataaaacagcacatttgtcatttccgtgccatgagtgaggaagtcaacgagttaggcaagctgttagctgacaggcgcgagcgggaggcaagctaaagagataaataaggattccaggcattgacaggacaaattataacttgtcacaacctttttaaattcagaagttttcaattaacatatatattgctgttacatataagataagggggcactgacgtaaacacgcgtggggtgcagggacccccccccccagtgccaagggtttgggcatccgggcttgggcatccaggcctctctggctctgttctcccattctggcaagccggagggcacccaggtttgcatggccagcctgtaggcccggggctccgtaaggtgggtgagagtgtgataggctaagtgcagctgcttcttttgctaggagccccagttcacaggtccagcaccctttcttcatggaagcaaagctcccagatcaagggagaggctgggcgaggcctgggcccaggtctggaaggacaagtcctgctctgtctcctggagtcctatgtaaggagtaagagatagagggcagaggctcccccttttgcgctccaatgtcttgccctcataggaaaatctgagctgctggacacaacatatcaacaatggccacatcctgtgggcaggcctaggccactgaaacctggtgtggcctgaggctgctcctgagctctcaactccttctctgactcaccggcccagtgccgccaaggaaccggtcctgtgtcctacctaggaagagctgcttttccctcctcagactttgtttctggtacagttcccagggctcttccttgacccatgggtaggaacgagtttgccagtgggtccttgataacctgaggccattcacctagagcaagtgagattttcagaggagcaaagcgctggagtcaccctgtgaggctgcaagttaggggaagccatgagatttctggggaagtctaggtgttgtgactgtgactggggactgctgtgggtgaggtttgaagagtgtggagggactgtaaactctgcaaccatcttcaccccaaaggaggctggctttttggttttaaagctaacccctatcctaaagcagaatctagacttgcagggcctctctgaactcaggtcccagcctccccgcaaagtccagctggaaaggaaagtttgggcgggaagcgagcgtccccgggtctgaggctgctgggtggaaagctggcctaggagggcgagtagggagcaaaatagggcctggtccttgcggggccggggagctagaggccgcaggaagctgggagggccctttccaggcaggcagggcagcctcctggcgcggcccaaggcgcgaggcagccgctggctagggaggtccagtctcctgcaggccagggagggcttcctctgggtgcagccgtctccctccgctcctcagcttggctacttggtgctcggaccccgcatcctagtcctcgtccttgtgggacagaggccaaccttgctgtcgaggccccaatatgtcaccacaaacactcccagaacaagagcatcaaccccaagctccagaacttctggtcttagcctactggagcctgccaccaaattaaacaccgcgaaggctttgaatccctgcaaagacggagcctggaagaaagggagggaggaaaagggaggaaaaaaaacaagttacatggaattagttggaagcgggcgcattccccagcgaccgcagccattaacattataatctcaaacgccattttttatgtaacactattgttagtaaatcaactcctcaggtcctcagagacgctgacccctggcaattcagtgaaagtgtaattatctccccgaatcttggacagatttaagagattacatttcaactaaatctatatcaatgctaattccctctctccccccagcctgcaggtgctaggcacgggaaatggcgtcaggccccagcagaacgcttcacaaagaggagagggctagctgtgtacagggccaaaagaaatgaagccccacataaaattacacctttttttttttgctacaaaacctggttcttatatagcaaagttaaacaaagcagctatgctaaattagcgttacataaaggcgagtttaatgctcggttacagtcaactggtgtatctctgatggctaattgtctatcaaaattaaagagaaaagaacaaatgattcgttataagaaggtgttaaaagcctcaacaaaaggacatttcacaaatataatatcggcagctcccggattgcctgcggggttgttcaggccccgggcctgcacagctatgagaagtggggtgcagggtgctatttgcccagcaaaagctcatttcctcccaaatgagtataatgaaaacccgagaggcgatattagtgtaaagatcgggattagtccaaataggagccgcggacttgggcttcaaaggcgacccctactctttttgcccagtctgggggcggagggcgctcgaagggatacttcaaggacaccacatccaacttgtcgcagccccacgttcaggcacaggagggagcgaacattgggcagagggtaatttcaacaaaggacggcaggctccggggatcccggcttttccctgagttctctgggttggaaggagagggtccgggctctgtcggaggagtgggtacagcccagcacatgcttttctgacgcgcagcgctggcctggggagtgggtgcagctgctgcagccagcccccaccccgccccaggctgggaaggacgcagagtataatacgacggcccccttccccaaggggacactagatccagagctccaggcatatttgttgttcaaagttaattatacctgaaagcaaccaaaatgcgcacgccaggcccacggaggccgattgccgaccagcgtagccggcccgcagcgccagagaagccgctcactccggcggagtctctgcaagagaatctgaggctggggaataaaagccgaaactaaatcaggcagcaagagtaacaaaccatctggaaaatggacccacggagccgcaagaatgtactttttttttttatccttgacaacttgtgtcctaaagaaagtgtattgaagataattgaaatgattacaattcattgctgcctgactttgaatatgaacagtcacataatgacatccccgccacacaacaacagtttaatttccattatccgacttcgggatcctagcgccagccgccggggcaacgtggcgctaatgcagaaatcttggctcctgcctgcattattcatttcggggacgtggggatgggataggagtggagagtgggtttcttcccctcccccgaacttattctgaaaatcccggggaccaatggacaccgaggaaccgaaagccgagagaatagctgtcaaggggccactttgaccgacggggctgcggtcgacggcgctccccggctgtctttttgtcccaggggttcccaggcccgcagggctaggatcccccagctcccaccctagtcagtcccagtcagggaggacctaggccagggcctcctcccaaggctgtcatctggcggggcaaacgctcttctctcattccttcgtctcccttccagccctcgcatcctttccttctttctgcttcagagctctcaggctcgcgtgcagggcgggatgggcccggatcgggggccccttcgcagatttgaaagttgcctcggccttgatcttctcccagcctccctgctggggactcacccccacatcccgctaccccccggggaaaagcgaagaaagccagagtctctttgcacggcggggacgctggcgctcacctctgggcgcggcctcggtggagcctcagggccagggcggggtgtggcggggtgtggcccggtggggtgagggagggacccggggtgcaagccaggccaaggcctcctcagtgcgcaggcgccgttcgggcccgccgccccctcccaaggcgtggggtcccggggacagaccccgagcccctctctgcgcaactaccgcctctaaaaaaaagaccatctggtaattgtctttctttagatcttcccttaattatgcttttaattaaagatggttcaaggcaccggaccacatgaagggcagtaattacaaattacattacaaacccgacagacgtagcaggatctgctgggaaaaaggtaccggaataaaaatttgactaaagtttgggataaattaatcggtggcttgaagaacagtagcacatttctgattatgtaggctccagccaggatttaagttttgtgtcatgattgttttcatatttctttgacatctattgatttggaggcagctgcaagcctttgtcacaggagagaagagcagtcacaatatattagcttgatggcataactcgaaccggagaagcgaggggagcctgagtgactggggcgcacatgacccccctcctggggcctttgggctcaacccttacttttaacttgttctaacaggaataatggagtagtactactaatgcatggtcagaaggggcttttctgtctagaacgcaggcggcgggagttgcaccgccacagcccgggagaccaaagagtctccactccccgctcccggcgcctcctcgccgaccggagccccgagcccagtgagcccagccggtcccacgtcgagaggcgctgggttgggagaagttctgctggtcgtgggctcggcccccaggcgccaggccgagtgcccacctcggcttctttagggggcctacagcgggcagccgagcggctggcggacccggagcttgggaggcgaccgccaggctggtgcccggcctgacccggcgttcgcggccgcccgctcgcccgccgcgggccgggagcgtacaggagtgtgacgcagattgtgaaaacagaagggagggagttgggtcatttccttcgctaatcatcgccccctcctgctcctcctccccacccccatcccatcctcgccgccacccagcctcgaactctcttccttgccagagtctgcctcactttgagccagtggctgcactttatggagaaaatatatgtgcccatcactcacccatctatttgcagcgtccatggagcgcctcggggaacacgcatggacaattaaacacacccacttacggcgggatgatgaggctttctgttaaccacatgtgttcagaaatggatacagccctaattttgacacggaatgcagctaatgcaccttgctatagatgtacgtccgttggaaaagtgtgtgatgggcacctgatctacaccaagagaacagggctgtctgcagaagacccagcggcctgacaccttttcttgttgccggggaaggaaagtttttcttttgatttgtcctctcacgatttttcccttttcctttgcattacagtttcagagaggaatgtaaatattttgactagacctctgcaggggccttttaaacaccaggcacaatcatctgtggaatactgtagttcatactttcaaaacttgggtgttaaagagtctgtcttgctgaggaaacccatagaactagtggcgacctttcaactccctatttgtgtgatgaaatgaagtatgccctagtgattgtcgaattttaaggacttgttctgtcactgctactttccgatcgtttgcagggaagaaaaatcaatcaaacagacctttgatggggttgtggcaaggtcacatttcactgtgctccaggcttacctcttcttaacgcccctccctgctgtggagcgtgtgcaggtagtatgcaaaactctagaaataatatttgaaaaaattaacaccttgtttatctcttctgtgtatttgatataggggtttctttcttttcctgttttggtgtttaatacaaggctgatatattggaacagaatgcagacttcaaagaaactaaaattaggaggcaaatagcgtcaaggtttcctcggtttctgtatgtagtacaaatagtatagcgtcttttcatccaaaaagaagcaaaaattgccaggaggcataaagcatctctgaatatccgttttttttaaagaaacaaacatttcccaaatattgatgtacgcatggttttatagtctgaaaatatttctaggcacaaatatggcatacaaacattcgtttcaactctgtcgttgttgttaaaatgacagtaaattatagtttattttaagatacctccctgttaatgtcagttgaggttattttagggcctggatgctctaggaagaccacctaaaatgtgtttatttctctgcccaattcacctatagtgtaaggagcattttattttattttattttattttattttattttattatactttaagttttagggtacatgtgcacaatgtgcaggtttgttacatgtgtatacttgtgccatgttggtgtgatgcacccattaactcgtcatttagcattaggtatatctcctaatgctatccctcccctccccccatcccacaacagtccccagagtgtcatgtaaggagcattttaaataaaatattttgggcatccttaagtccttttttaaaaatccaacattctacaattgtgacaaataggctgaaaaattttgttttgtttataccaaattcattttaataaagcatttgctgagattttaatacaacaaatgccaacaaaatgcatcagagtagaaaaaagaaaatattttcagaattgcctataatattgcttgtgatcctaaattttttgatgcaaggaacttgaatttttcagctaatattattctgttttcttattctgtgtttctattagaacactcacctatgctctgcttcccttgctgtcttcccatagcttatgtgtgcactatgaatttcaataaatataaattactgcttaaaagagtaaagaatggctactttatgactcactgttctctccttacaatctgctcaaaaatcttttttacaaatcccattgtagctacttcccctcaattccacgatgaaagtgaatggcaaatgccattcaatttagaggaactcaagcacagagaatataaagatgttgttcaaagcctccctcaaatctatctgtaggcttacaaacaaaatgagactggaggcaacatcagtacacatctccgactccatatgaggttacttgaagctttggggttcactctggaaacagaagacatgcatcaaggtatgtgttccttagagactgacaagcaacagtggacctcaggagaaataaaacaactcatgctctcaactgcctctgatttgcagacaaggaagagttttctctaattttttttttttttttttttttttgcctgcattactttttctgtgcttggtggctaaaccagagagcagtctgcaacattttgcttttggggatttcctgtggctttgccacattccctggagaaactcataaagtcctggagtctatggagggattacagagagccacaaacatcattcttcctctaatccatctggggcagatacagtattgataacaacctttctgttacttgacagtttcagaccattcagatgagaacaaataataggaatttggtagtggaggtggggaaaatagaggcaattggtatagtcttctgagttgaaaggactggtttccattccaaaatcgtggaaacaagtacaaaattaaacactttccattcaattctttggaagtgatttcttctgtctttggttattgtagtgcatttgtgttggggaattgatgcatttatttactttgtccctaagacaagacagtgctcagttgcttgcattttgtagcttcagtttgtttggctctcccagcttgaacctactatgttaggtaataaggaagcccatttgcattagataataagaatcagggacaaggcagacacaatgctgattaaacaagggctcatatcccattttgagagctccctgataaccagcgccacaatcacattggtaggtcaagcaaaaatctgaagataaaatcaatgtcagttttctgtcttggtgacagacagcgacccaccagaattatatccagtaaatcctgttatcaagttcctcactgtcgttgatgaattcacttatgctatgggtcagagattatgctgtggccaccacctatgtgatgatgtctacggcatccctcactttgacacagacttacacagaacaatacgctaacaattatagctgtccaacttcctggtctgctttgtaaggtaagggcagtgaagacactgggaatgttcaagtggaatctggggtgtggggaagaccaaacctgcatgaaggagtggttagggaaattaacttacttcccaaactgtatcagggccagaatcatcccagaaacatttattttatctattggttatttattaaataatttaaatatgattacttgtcaaaatgaaagtacattcatgtggttcaaaattctgaagttcagaaaatattttgtgaaaattcttcatatccagtcatacagccacccccttcttacctattgaaagcaaccaacactatcagtatcttatgtataggggagctttaaaaatatggaattccaaggcctacttaatgagactctttggagacagaggctttgctattggtgtttaaaaaaaatctttccagataagtttgttgatatgtgggcacttaagtgatttttagacttctttcaaacactgagattttatggaaatatataatgtaatactactcgtcccctacgttcctacaatgtgtgtaaagtattttcaaaactagtatatatttttttctttttgcaaccctgtaaaataggtattattttctgcccccttcccatttttcagagaatggaaacttctgaaaaactctcagaagtttggacaacttgacggaggtaactcagctagtaaacagcagggtcaggtagcatcattcaaggccatgctaggacctaagtgcttttactttgagctttaccccacatcacatcaaatgataacatgacccgtacttcaacataattatttgctataaactgttttaaaataattttgataaatttgaagttcattaggaatgaattattcatttcatttttatgattaaactttactacatttatacatgacatgtaagttgagttgcagctggtgtgttgacatgatgtcaacgcttttagtcatgtaaacatttatcaatgctgactctgtgtgtgtatgtgtgtgagacagggtgttactgtgtcgcccaggctgtagtgcagtggctgtaatcttggcttactgcaacctccacttcaaacgaccctcctacctcagcctcctgagtagctaggactacaggcatgcaccaccatgcccggctaatttttaaatttttttttgtagagatagggtttcgccatattgcccaggctgatcttgaatttctgggctcaagcgatctgcccaccttggcctcctaaagtgctgggattacaggagtgaacgctgcacctggccgatgctgactttaaagttgctgccatttttttttttttcatattttggagctactaattttggggataagggcaagaattcaaatatcttttcaagcttttgaggagcttgtaggttttaggttctatacttgaggtgcttgttttagttaggttaaggctaaatttctctaacaaatagccccagaaaaaattcagtggattaaagagaataagagtttattttcctttcatctaacagtctgaggtgtatgtttcagggtagcaggcagcttgctttatgtagttttccagccatctaggattctctatcccttaggctattgcctttatctgcatgaaccatagattcctccaggttctggttcataagtggagaaagtgcaggaggtgcgtccatggtttttaggtccatggtctaccttgaaactggcacacattccttctgctcacattcctttgttcagaacttagtcacatgtccacagcaaactacaagtagaattggtcaacccatattgacccaaatgcggtggtgacccacatgtagtgaaacaaccagcagcattcacaacaatgcataatgcagctaggagactgttacaataatccaggtagaagctgatgatggtagcagtggtatttgtgggagataactgaattctggatatattttaaagaatatcctaatagattggataaggctgtgagtcaaagaagagtcaaggatgatgtccaggttttggcctgagaaactagaagaacagatttctcatttatagaggtgaggaagactgaggaggaaatttctgtagaaaggcaaagaatttggtgttggatatattgggtgtgagatgcctattagaaatccaagtaaaaatgtcatgtaagagttgagcatatgagtctggagttttaaaactaaacactgaataaagtcaacaaggaaatcaatataggcagagaagaagcctaaggatcaagctttgggacatgttgatgtttagaggtctggaagatgaagagaaattgaggggagtccctagaaaggcaggaggataaccaggaaaggctggcacacaggagtccaattggagaaagcattttaggaagcggaacatgatcaacctttaaacaactatagtgttaaatactgtaaataggtcatgttggatgagaactgagaattgactgttggatttatcaatatgtcatggatttttggggaaagtgactagtaggaatagaatattggaataaaaacataatgaaaggagagaaatttgaggcagcacaagtacctataactatttcagtgatttttgttgcaaaggggtaagcagaaaaatggggcagtagttagagatcaaggttttttaaaggttgcatgaaaaaatcttcatgtttggattctattgggaaatcattcactagagaaggtaaaattaatgatgcaaggaaggagtggagaattgtcttatcagtgtccatgagaaggcaagaagaaataggacctagttcacaaatggaggtgttggtctacttgcaagcatggatgatccattcacaataatgggacaaagcagagtgaacagctcagatacagtgtagcaggatgtggtgaaggtgcttgttcttttctgattttctcaataaaattgtaagtcaggtcattatttcagaagatggagaaggagacactgtgggtttgaggtgaagagggaaattgggaaactcagctagacaatgggtgtgtgaaataacaggagacttgtacaaggtttttgggcatctctggggcctagtcggcctcactggtgtatacttttctctaggcacagctcaggtacagagtaggctgagagttggatttggttaggattgggctgttgcaaggagagacagtatgatgaagggagagaaagaggcaagggagttacttgtgtgtgcaaacgggttactccgtggaatctaaactgggtagaaaaggacgtgaaaacctgaggggataaagaccagtggagaagtgataggattaaaggattttagatttaagtgggtcaatgagttgttgaagtgatggagtgagcaggaaagatagtaaatgatagttggagagtgaaatggagatgaccgaggggtgaaattaatgtcaaagtatagcataagaccatgggagtgggtggtagctggagcaacagaggtcaaggaactgaaaagcaagggcactggaaggatcatagatattgaaattctgaagaattagggcaggggccatgctggaaggagggatggtgagataagagctaaagccttgaagaatgagtgggaaagacctgggagcctatagacttcagctaccagtgtgggatagctggatagccaccaatgtgggatagtctgatggcatgagagtcaaagctggaagattttagggaggaggaagaaacaggtatgaaagtgccagagaaggcaggccctgtggtttgagtgacatggagagaagctaccacctgagggggctgcagaggaacagcccagtgtcaggaagagaaagtgaaggtccctcaaagaagaggatagaggtgattgtgctaggacagactcgagggcacactggagggatatagggacagattagagcacttatggaattctatggaatcttgaaccttccaggtcctggttcatctatgaatgttgatatcttatgacttcaaatttactccctccctctgggcttctctctcttgcttttataggacagtcctttctggtcattcaaatcatttatctgtcctctctgccatccctctcatgtacctttcaggtcttccacttattctattccctccctccctccctccctccctacttccttccctacctccttccctcccttcttccctccctccttctctctctctctctctcacacacacacacatacacacacacactcacatctatctccgtgaacagaactttggcataaacttctgagcgtacggaaatagatttggctccttacattaataaataatagtatgcataatgaggaaaacatttaaatctaaacaatacagaacttagtaaggtaggaagtcagtttcccctactttcatttcagtcctaaacacatccttttttaagcagaatccatataatgtttattatataaccttccaaattatttttaacgctagacatttacgtacacacacttgtatatactcattaatggaataaaggttctggttttttttccggcggagggtcatttaacatagattatctttgcaagtcactgtcatattattttgtttttagcggacacacattatgccattgtgtgaataaaacattctgtagtgatggacatttaggttgtttggaactttttctattataaataatactgtagtatacttccctgtacatatccttgtgctaaaaatttggaagctagactcctacaactaaagttgctgaatgttacactgaatgtacattttaaaatttggctgacactgccaaattgtcaccctccccaaatcatgtaccaatttatactcccactagcagtttatgagtgtgcttctttccccataccctacccagtaatttgcctccttctggaggtttgtaaagaagcaatctgtcagacagtggaagaggcaaatgagaatctgtgtacactgaatacacctgacaccttgttgaatcccagggttggttctgctgatctggctgactaagcagggggtcccccttctccccctctctctgggctccatggggatcccagctgaggaacggttgatgaggggcactggggtgctcgccttcactttgatttaaagtctgcttctcagtccactgctactcggggacaacatgctctgatggctgataatatgctctatttgtattctagctggatataggtattagagccaagtgtttattcatttccatcaggggaagtcttcaggcaccgggtgctcaccttgatctttaattttaatcacaaaatcaaagccctgctgtcatttcaaaggctcactcagacactaaactttagaaggtctattagtcctcatcccaaatgggtaggagaggtggatgcttccattacagggctccatccccattgccttttcccctgatttaaactaaggtgcaaaggaagagaaagactgctcactgaagctcacaaccttttaaagtaccaataatttgcatgaacaatgatgcccacttttgtttttaagaccacttaatagacttcatttcttaaaccaaaatcactggttaatctttccagactgagtcctcagaagggaactgctacaaatttattcagaggatttcaagcagtaaaaataatgtgcagttctttttaatgggtaataaaattccccaagaaaaatgaatctttctaggcatagagtagatgcttttcaaagaagactcactatctcctttttaaaagagaagagcctttttgtttttgtaaaatcaacacatttaaagtttaaaattcaaatgatgcagaaaaatataatgaagatagtttaaaaacacgtgaaattctacaacccagaaaaaatcacattaccatttttgccaaaacacatttctataaacactctatagatttatacatatatgtggaccatactcttttgtaaattgctttttatttcactcaagaatgtgcaatatccatctcctcatatatgttactttaatattgataaacattttattgtatagatgcctcatcatttacttagctagtgttctaatgatggacagttaggatcctcctaatatatttctgcaattgcaaatgatattgctatgaagaaccttagagctaacttcgcacatgtctttatatacttccatgtaatactttccagaagtaaaattaatggcaggtaagaattctaccactgaaccacccatgctagaaagtaaaatgaatggatttagaacatttgtactttttaaagtactttagaaaggtattgaattgtaatttcacagcaaattatgagactgctatttccccatacggtagcagatatgaaataatacaattgatattgatttttgccagtttgatagatgaaatagcactaatttttgtttgtatttttaaatagcaaagtttgactctttttcttttctttctttcttttctttttttttttttttttgagacagagtcttgctctgtcgccaggctggagtgcaatggtgcgatcttggctcactgcaacctccgcctcccccgttcaagcaattcccctgcctcagcctcccgagtagctgggactacaggcatgcgccaccacacccagctaatttttttgtattttagtagagacttggtttcaccatgttgaccaggatggtctcgatctcctgacctcatgatctgccctccttggcctcccaaagtgctgggattacaggtgtgagccaccgcgcccagccaactctttttcatatacttaatggccagtttatattctttgctcattaaaaaatgggatattagaatatttattaaaaataaccatttgtctgtcttatacatgttacatacattttcccagttaattttcaaattttgttttaaattaaatttaaacaatcatatttttgcatttccctttaaaaagtgaaaaaaatatttttaaaggggaaatgatacatgtatcatgatgctgcagagagctttgactgaaggaaacttggaggtaggtggcaaagtgggacagatggcatccttggttgagatgcagaggatccacttgggagttactcagccagaggctttatttaaagatattctaatagtttttgcttgtgtgttttcaaaaagtaagagaaagaaaaaagccaaatggaaatatctaagtgtaacacacacttgtttttccattgcttttccccaagttttgtgaattgctcaggctactaaagactggagttgttttcagggagagtttggatggttatagcacgatggctgctaaaacaaaaacataatgggacaggtcttccttgactgtaatttgctttcttccactctttcctcaaaggcttcatatctaaaatcggcttgaagattaaatatgtggtcctttgcataagagattaatgtcaatttagctttacttggcaattagagggtaaaggcaagaaaccaaaccagaaagaaaacaaccctaaaaaacactatttcaggttttgatgtgcttgcattgtagcacttaaaaaatgattctacttgaataggaaatctttattcatttgggcttcaaatggctttcaaaattataggggagatatgttgcttactcagaagaatgctctacttccaagaattttggcaattttatgttgtagaggtggattaatattctataaatttgaagacatttactatgggtcagacactgttcttggtgcttttaaacataaatataaatagatacacacacacacacacacacacacacacacagatctgtatgtatatcttgcttaatttgcttgatgtgatcttgccttcccccaagccttgaaggagcaaactgaggaagctttagggtggtcctggagttctatgtcgttgaagacatggccctttgcataaatacttcaacctcttcttagagggttggaatgaaccaggtgtataaggcctgagtcatcctaagtatatgaggagtcaatgatagggacttatccttcagtcaatatcaaaccaggattgtacttttcattcttaatgttatacggttaaggaaaaacctaggtttttaaaaagttattacttttttaaaataaataattgatccacgtgggagaaaatttacaatgtaccaaatggcatacactgaaagatgtctccttccctttcccataccaaccagttcccctcctcagaggcaagtattattgtcatgtatatccatctagaaatattctgtgttcatataattatgcatgtgttcatgcacacacacacacacacacacacacacactcactctgctccaccttttcatggaaatagaaacataccataacactgtcttgcttttttcacttaatacagtatcttggagatgcattattgtattctactgtgttgatgtgtcaaatttattaaccagttgaaaatagtattttgctattaccaaccaaaatggcaatgaatattcttaaacatacaacattttgcgtgaatgtgggtgtatttgttggacaaacgatcaagaagtagaactgatgcatcacagggctcatgcatttttaatcttgaaagataatcaggctctgtgattctgcagaacaagttagtagccctttttagtaagatctccctgttagataaattagcagggtccaggtcagaagtgacttcaaagttcctttcttgaaatgtctcagctaggtgcaaactatgactctctggaacatgtgaaaaagatatccaacttgtagatgtggtactcacctgttaaaaccaatgtcaaggtagaccttagaaccctgcagatcctgaagggcaatagtaagagacctcagagtcattggagtatgacccactggggccaccaaagttatacactgtatttgatgctacctgctattaattaggctgaataatatgaaattattacaggcagtggctcatgcctgtaatcccaacactttgggaggcagaggtggatggatcacttgaggtcaggagtttgagaccagactgaccaacatggtgaaaccctgtctctaccaaaaatacgaaaattagccgggcaggatggtaggcacctgtaatcccagctacttgggaggctgaggcaggagaatcgcttgaacctgggaggcggaggttgcagtgagccgagattgtgccactgcactccagcctgggcaacagagcaagactccatctcaaaagaaaaataatgaaattgtagacattagactagtttttacctacaaaaatggcaatttttcatttcatttgataagtagttcaactaatattaagtttattttttggtgtcttagggagaattccttagggaactgggaaagatttcacacagaaggtaggttttcaagcctgggaagcagagagataggaaggaaggttgggaacgtagacaagaacattgcaagttgtgagtatagaagacctctgggaatgagcctgcatggaaggtaaaagtgtgaatcaaaggagtgatgttctgtttctacaacttttcatgaactgaagtggatctcccagctccttgtgtgaagcagaaaactgtagttcatcaaaaataattgggtcagagaagtggtggttcacattcccaaatatgtacatctggattagggttttaacctcagaacagaaggtgatgggcattgaaattttggtatatccggggttttggtactgaaaacttcagttgaatattggggtcaaaatccaccctgttcgtatagacttagaagtggccctgaagttcattgtcttaaatggttgctaaggggatgattatagggattttcccacacttggagaagagtcatcctggagcactgggataaatatagagtgagggaaagtgtgtttccttttaaaattagaaatacaatataacaacattggagggagtttagaaatagaggggtatcttcacctataatcaccaccctaacaaaacagccctgaatgtttatgtaatccttcgacttcttggcaatttgctttcatatttttactccactgtaactacaagcttttcttattttacatttcagttttgctaattattattttaaatggctgcatattagtcccttgagtggtggcattataatttgcccacttattttcccattctcagacatttcaggttacttccaatttcttactattagagaaaaaagtatttttaatctctaggctgataaaaggcttcagtccacactttagttttttctttcttctttctttcctttctttctttctttctttctttctttctttctttctttctttctttcctttctttctttctttgacaaggtctgcctctattgcttaggcttgactgcagtggtgtgatctcagctcattgcaacctctgcgtccccggctcaagccttcctgccacctcaacctcccaagtagctgggactacaggtgtgcaccaccatgcctggctaattttctgtattttttgtgaagatgaggtttcatcatgttgcccaggctggtctcgaactcatgagctcaagcaatccttctgcctcagccttccaaagtgctgggattacaggtgtgagccactgcactcagcctagttttttcttattaaagtaaattactctgtcacatggcttccctctgtcagcagagaaacctatttctctattttactagcactaaaggcaatagtatttattgcaaagtgtgtgggatagtgtgtgacaaataatgagggctatgtcaatgtaagttattattataactaggattcctggtcaccaataccagaaaaagacctgtagataaagaacctattgagaagatactggatcacccacagagaattagtatcaacgaatatggagcagccaagcggggctggcagcagaactgtagcctaaatcgtgccataggacttgtctggtttctggacacctctgctgaaactgctaccaccaatgtccctggactggattgacagtactccatccccaccaggaagaattctaccccttgtgttttttcattatctacttaagattcaagatagctgaatctaagttatgttcctaattcttatgcatctatagtgggagatagggctctgcgtcccaccaggactctgacagtggggagaacaccctcaaaggggaaggttgttcaagttccggggggtcaagtggtaaatatcttcacttgctcagactgcctctcacctacaatatagctcagtcaataaaggagatttctactctactgattgcctgaaggtaaaagagcttttgggataagcagcaggttgaatctttgttatcgaagggctctttttgagggggaaaaatggcaacagaagggagttccctgcaccagcaaaaatgcccatgagaagccttctgttgccatttttccccttcaaaaagagtccttggataacaaaggttcaacttgaactatgacttatatcaatgatggggttactttgtttcctggggtattagatcccggtacaattagttaaatgtctcctcccctccccacctctaaaataagaactgaaagcagagacgaagtcagagtagaaaataaatgacatgtttcttatgaaagcttactaacaattaggaaaaaatttttttcttttttttgagacggagtctcgctgtcacccaagctggagtgcagtggcaccatctcggctcacttcaacctccgcctcccaggttcaagcgattctcctgcctcagcctcccgagcagctgggactacaggcatacaccaccacacccagctaattttgtatttttagtagagaaggcgtttcaccatatgagctatgctggtctcgaactcctgaccttgtgatccgcctgcctcggcctcccaaagtgctgggattacaggcatgagccaccacgcccagccaacaattaggaaatttgacccactcccgaacttgaacagtactgtactgactcagagctctagcaaatatacaaattaagaggaatagactgcaacacagttacataatttacttaaaactctctcagtggcttctcgttagtttagaacaaaatcccatatcgttcttcctgacctatcagaccctacatgttctagccctggcctttctatccagatcctgtttaataccctctaaccccagttcttggctttctttctgattcctccttccttaggtccttgtcatgttgttccttctgcctggaagggtcccctccgtgtccaggcagccctaggccccatctaacactaacttctgatctcagagaaatcatctgctgctttagggaagccttccctgatcccaggtttggtaccctggtatatactcccatagcaacctgtctgttgtatcactcattatacctgttatttctgttaggctgtaagttccatgagtgtgggcacctcagtcatgttcaacatggtctcctctgtgcctagaactgttcctggcagagcatgggcactcaataaatgtatatagaacaaactgaattaaagaatgaatgaatgttagctttgcttgtccttatattaaatgtgcccataatcatgtagattattttaaaagaatgttttaagaaataattttaagttgcaaagatagtagagggttcttgtaaagccttcttccagtttcctctgttaacatctgacataaccataatacgtttatcaaaactgagaaattaacattgacacattactagtaagtaaactacagactttgttcagatttcaccagttttgccattaatgtcttattttctgtacagtgtccaatccagagtactatgttgtgtttaattattctgtcttcttagtctctttctatttataatttttcccctttttctctttctttgtcttccatgaccttgacacttttgagaactagtggtcagatattttgtagaatgtccctcaatttgggtttatctgcattttctcatgatttctggagttacagatttggggcaagaatgtcacagaaatgatatgttcctctcatctcatcacattataaaatacataatgttggtgcatcttattacagcaatgttaaccttgggcacttggttaaagtgtctaccagattttgctgtgtaaagtgtcaattcttccttttccatagcctatttggtagaatcaagtcactaggttaagctcacactcaagggtaggggagtttaagttccatctcctggagaaaggaaaatcaaatgatttgtagatacatgttagaatcaccacagctatttactttgagggaattaacctcaaggctatgcaactgtcctgcctctcctgaaagttttacccacttgttttagcattcatcgtggatcttgcttgccctacatttattatcacagtgtccatggattctttttttgtacaaagaatgaaaattcttgttcataaactgctttgaaatttgaagtttagttcttgtttcctttttctttctttagagagaggctcttgctctgtcacccaggctggagtgcagtggggcaatcgtagctcactgcagcctcgacctcctgagctcaagcaatccttccactttagcctcctgagtagctgggactacaagtgcacaccaccacacctggctaaaagtttttattttttgtagagatgaggtcttgctatgttgcccaggctggtctcaaagtcctgagctcaagtgatcctcttgcgtcagcctcccaaagtagtgggattacaggcatgagccactgtgctgggcccacgtttgtttttcttagtaactgaaacattattcgtatgtcaaagactattcatcctagaggaatgaaaatgaggtattgccctcccgctgacctttttctagccctaactttaaggtcaaaccacagctcttaatttataaggacactgtaaagttttcagctcggatatttcttatgaaaattaagatgggagagttaaaaataacagaagaagtaccgtcaacaaagtgggataattaaatacttaggcagaaattaataagacccagagaagcttgttgtgttttcagtttcattagcaaatctcattacttctggagtcttaaatgttgcttaaaacacaaagttattatccctctcctatgctctttctggcatctagaagcacattttatagtcaattctcttaggagagatcagggtggtggcgaatggagggacaagagctttataaattgtaaaagtcctacaaaggggagagattggtattaccatttttctaattgctcaatttttaaaaaaaagcaaaaacttggcaacccaacattgccttgtttcttggagcaaaagtgggaaataactttgtctccatctgctagggacaccaaaaacaggccgactctttactgagtgtgtaatctccataggaagtgggatagaataaaatggaagccacaccagaaagaatcctgagttctacattttaacaaatggcaggggctctggaagagcttcaaaataaagagaaaaaaacagtggtatctgacaatggtatcagaacactgatgtgggatgattaaatattcagaggataaaaaacatgcacatagaaagccattcaaaggattaagagaaaggttattttgtgactaaaaagagaaaaaaattaaaatacccacccccataatgaatacttcctaacagtaccatggaaccttgactcttgactctgtgctgtaccttgcattccagatgacttgtaaagcaatgatttattggtcccagagccagtgagcttgggagcagttcaataagacagtgtggtctgtgggtcctgaatcattattctacctggcaaccttatgacacctgctgaatcttggagggggccaggaggaaatgatgttgatttatagagggagtgaaattgtttgtcaatgaaggtataaccgtgcttcttccaggctcaggcaactataggaaaccagattggcctttactgacaaattaacataggccaaaatttggaaaagagagcattgccttgcatttttattaaaaccttgtacttttgttaaagatttcactatagctctattaatatactttctataatattggtcaaagaatacaaaatgtcatttatataggagaaataagttcaagagatcgattgtaccatatggtgactatagttaacaatatactgtattcttgaaaattgctaagaaagaggatataaagtgttcctaccacaaaaatgataactatgtgaggtaatgcacatgttaattatctagatgtagccatttcacaatgtatgcatacttgaaaacatcatgttatacatgatatattcaattttatctgacaatttaaaaattaaaaaaaaaactttctttgagatagttggtacaaacttctttataacattccccataatgtttgtaaagtggtgctctgggccaggcctggtggctcaggcctataatccgaacactttgggaggcagaggtaggtggatcacttgaggtcaggagttcaagaccagcctggccaacacggtgaaaccctgtctctactaaaaatacaaaaattagctgggcatggtactgcacacctgtagtcccagctactcaggaggctgaggtgggaggatcgcttgagatggaggttgcagtgggccaagattgcaccactgcactccagcctgggtaacagagccagattctgtctcaaaaataaataaataagtaaataaataaagtaatgctctgatgggtgagcgtgatgcacagtgtatgtatatctttcaagaactagctttgtgttttctaaatgatcataataccctacattcatatgtgtatgtgtacgatattacacccttagtttcattttctttttataaaaatcatgtgttaaacccattttgaaagatgaggaaactgatactcagagaccttaaataacttgggtaaggttaaccagatagtcacagagctagtagccatagaatggaatgtggcccttcacccagtttttccactgcactggttcctggatagagagttttgtgctgctaacctcctaatacccattggaaaataagacaggtacatgcgttgtggagtttggcagaatcaaccaaaagcaattctattttctttacattaagcaccaaaaaattaaaagctatccaggcttgaattttagatagacaggtaataagctgtgattgctcttagatagggccccccaggaagaagctctcagctctggatggcagacacatgaataaatagtcaaacccatcataagaataattctgcctgggatttgggaaggagctgctcagaaaaagtggggacgattctttaatggactccagagtctagagcttcaaagccgaatctgggagagccttgcgtatggcacagaagcttggaaggaaattaaaaccagcagagaatgtaattacctgagtaggaaatgggctgcaatttaccttccccaagggtgtgcattctttggttactaaaaaggtacttgctttcaatgagtttagtacaataaatggattttctcatccttgtagtggattttaaaatccaaatgttgtgacttgggctgcaatttaaaaaaattctgctattaggggctgggtgcagtggctcacgcctgtaatcccagcactttgggaggccaaggcaggcagatcacctgaggtcaggagtttgagaccagcctgatcaacatggagaaatcctgtctctactaaaaatacaaaattaaccaggcatggtggtgcatgtctgtaatcccagctactccggaggctgaggcaggagaatagcttgaacctgggaggcggaggttgcagtgagccaagatcatgccattgcactccaacttaggcaataagagtgaaactccatctcaaaaaaaaaaaattatgctattagggacacacatatatgtattatggattatatattaatggcctcttagtcagtaaattaacattgaatagaatttgttcaaggtaccgatttcattctaattaagcctgaagtctatgttgctcttgaggagaaataatgaaaatattttaacaattccaatcagataccattcttttaagaataggagttggtggaaagagtgagtgatgtaatcaaattccagtaattatttatatccacacattcattcttgtaatgctggccttccaagtatttcccagtgtagaaactaacttttatatattgaaggccttaactgaagatgaatccaagatcctgataagacacatgacgttttaaaaatgtgaacatttaaccttccacattcataaataaattcatcagggtgaagcaatttccaggggcatgggcaataatgttggggcctaaacgtcagtatctcattttaagttctgtgtcttggtaggatttgtccactgcactggatttagattcctcccattagggagctgccattccccaggatattgccaggaaatcccctaagtgtcagtctcaggccaggtgactctctgactaggcttccttgggaagcagaagagccaaggtgggcttcatggggtgctcagattcccccacccccaacattgggagagctcggaagcaatcacatcatttctgggtccttgctttctccttttgcacaaagtggacatccaagtattaatatttaagtatagaagaaattactgaggaaaaatataacattgaatattgctgagaaatgagggtagttctaaaataagtcagttgatgagaagacaataatttcagtgtaaatggaaaatgaaatctttagtattcatgttatcttctctctgagcctttctttgagtctctatcaccaggattttaagagttcatggtaagctttaagtgaaagcaggagggacctcagctcctctacttaaaatcaaggtccgtgaagcacttgctgactggcagtcctggggacattctgtgcagaattgcagtgccctatagtgtgagaccactcacattcccagcttgttctaaaatgccattcagagcaaccacaactccagacggctggtctttgtgcatttggaagaaggagaagtggggctcaaatttaaagctttccattattatagagacaatagccaagaaaagttcattctgaacaaagttttatgttaaaatatattttttttctgcttcctgagacttgcccaaatagtttcagaaaacttggagagatttttgcctatggccctattatagtggaacatcatgtttcttcttgtcctttgcatataatgacaaaggagctagctgtgcttctagtcggctctgattctgcattttcagcagcataaagaaaaacatctcattccttttatagaaatgcaatcccctgaggttgtcccttaaaagctgttttgattcatggatgttgtggctgccaaattctccaactcccaaactaccactatgcattttctcttggacagggaattttaggatcatccctcctgaccccataataaagccatttatttctccctgagatggaagattcattaattttttttcttgtttctcctttgcaattatctctattactacccataatcttcccaatctttttcaataacatcctgtgattaaagccaattggctcatgttgaaagctagaggaaagttaaccaggcacagaaatatcacccttggattaaagaaaaccaactttcactagggtggtgcttgagagatttttgataaggaagggtggatattgagctgacactaacgttaaatattgttgtaaaaaaagaaaaaaagctgatgctcaaaatagggctgagtaacatacggtagttccttacggcaggccaaaggacagttttgcctgcaaatgaggtcaaaggatgtcttgttgattttcaaatatcatcctaattattatactgggcagcatttcagaagaagaactagggaatcttaataatgataatagtagtagcagtagtagccaccacttatttagctgagtcatttgcatttattatctcactttattctttctataaccctttaatataggcattattatccttgttttatagagaggctaagtgatttgctcaaggtcacccagctggtaagtagcaaagtgaggatttgaacttgggtgtgaacgcccgagttattttatgcccaggattgtgcttggcatcgtaggggaatataacagaagcacaaacacttttcttgccttgagttaacagtttgacttgggacactaggaatccttaaagaacactgaacaatcgtatacaactaaatcccctcagtacttaatcccctgttactagttaatacctttttaatattagatagtccttgttcatgttactcgtgtagcttctgtctcctgattagatccatgccatggaggccacacactgataggagctgagaagaggcaaggaatgtggagggcagtgtttgaaacctggagacactgtttattggcggtaaaaccttgggcacatacctgccctttcagtcagcttcctcatctaaattgaccccaaaggagtgttggagagaaaaattaaaaagtgtgaggaagtgagtttgtacacagtaagtcttcctttaacaaaaatgacaacatcaatgctaatataatagctcagaaacagtgctattaaaattcagatgtaggctgggctcagtggcacatgcacccgaggtcctgcctactcagggaagccgaggttggtggatcgcttgagcctaggagttcaaggctgcagcgagctgtgattgcatcactgcactccattctgggctacagagtgagacctgtcactaaaattaaaaaaaaaaagaaaaaaagtgaactctattacaaataaaaggcataccaccaccacacttgtttttagtaggaacattttaaatcaggcttgtgtttgggcctgtgaacctggtccatcatttcaactcttctaaggttcctttgaaaatgctgagtaccgcattatgggtgctttgttatatgattttgtggatgctttggtatttctttttgttgttgttgttatgacagtctctctctgttgcccaggctggagtgcagtggcacgatctcagttcactgcagcctctgcctaccgggttcaagcgaggttctcctgcctcagccttctgagtagctgggattacaggtgcccaccaccatgccgagctaatttttgcatttttatagagacggagttttgccacgttggccagggttgtctcaaactcctgacctcaagtgatccacacgccttggcctcccaaagtgctgggattacaggcgtgagccactacgccctgcctggatgcttcagtatttctgaccagatgataagcctctgaagagaggggatgacaaatcttatttcttgggtctcagctctccttcatgtcaattttagtgccctgtacacattaatttacatgcagtaggtgatttttattcagtatgcttttttgtttaaggtcctctttctcaaatatctcccctgttaaggtgccacagtgggtaaatgttaccatttttctgatttttggataaagactactgtctgtagatattctttttaaattgatttactcctggaaggattaacatatggaactgctagtaatctttcataacttaatgtgaattaacctatcaggtaatttccaaataggaaatgaccagacaacatggaacacttgggagaaagaaaatgcattgaaagttaggggaggagagtgagggaaaggagtaggcacagactactaattctactaattctgatgagagctacacctacacactggatatgtacaatagatattctcttatctcacagatgcagattctcttatctcagatataggaattatagcagaactttacctgctatcagtagatttgggtgataacataatacagagcttaaatgtgtaggctctgtaattagctagatctaggtttgagtttcagctcagacatcatctagctgtgtaatattaggcaagtcattttacctctcggattcactgtttcctcatctgtcaaatggggataataatggtagctacacagaaaatctcactgaggatttagagaaataatgcatgtaaatgattagcacagaatttagcatgcagttagtagcattaactattattattatggttactaaatattacccagagttaggccatggaaaaatagtctcattgtggtattatgaatcctgtgacaatcacaggatacaaactactgtggtcagcctgataatgacagtattagatgttgatattttcctagaaatcataattaagtcctaaatttttttttaaattttttatttggaataattttaaatctgtagaaaagttgcaaagatagtatagttcccaggtacctttcaccagcctcccctaattttaacacactgaaaatatctttgtaatgtgtttagatatattaataataacattctcaccattctactagttctagttcttgtcttttttctggttcctgtttactgatatctagcatggtagacagaatttttgccttcatttcttcattaccaatggtaattttaatatccgcatccttgccatagtctcacagtgggcagagtctcacagtgggcagagtatatgcctctattccttgtcttaaggtttggccatgtgattccttttggccagacaaaacacaagcagaaacttaaagtgaacttatgcagttggagcatttggggagagaggaaaaataaacagaggtgcagtcagtcatcttgaacttgaacttgaattccccaatcttctgtaacaataatagaagtgctaagacctcagaataatttattgagaaatactgagctcatatttatagtgggatctgtttacaatcttatgctatattttaatgtaaatatgaatatatacacatgtattttattgtatgcattctttatgtcctctataaaggatatgcagtgaagttctggtattattttcttttcattgagtcctttatttaaagcactggttctcaaccttggttacacatagatatctgatgccaatgtctcgcctatagaaactacgattcaattatctgttttgggacccactcgccagttgttttttgtctctgtttttgttttgctttgctttctaagcccctgaggtaattgtgatatgcagccatgtttgagaaccactgctttagagtatattttgagatcctaaatgtatagtttcacacctgatttctctttctgcattagattgtttcaatgagtccattcattccttcatgcaatgctgatggccctgtcattacaaagactggtaactgtaatatcacctgccctatagcttgtgcttcaagcaatgctgcaaaagttgaaaaacaggaaatgcagttgatttggaaaatgacaccctcctggaaggaggagggaattatagcatgaaaaaggagctgagtaacacacatatatgggtacacttattctataactgccacttatataattataaatatttaaaatcagtgtggccagcattgtcttcaactcctgattcacctgtatgtgctctggctttcaatttcttgaagaaatgtttctgggagaaaacaagggcagtcaattatccatgtcatgagaaaaatctctcacctgctcagatacctgcccaggtgagaggatgtggttaagaaaaagagctagcaaataagatcatgcactccctttcctgtattgtgtgaaggcagtttcattgggctcaatgaaggaatcaaagggaacgtggtcaaatgcatcacatcactggctcattggcatctagtcttcccatttttaaaccagaagccaacaggaggttgacttggaattttgacttccttcattttacatctttgcctttcttctttcagacttttccaggcttgaatttccagtcaaccctttgtcttcactcaaggttacgttattccaacctcttttcctctcattcgtcaatggtgtcattagaagtcaggatcctcaagttccaatccagctctgcctttcattcagttgtttcactctctgagccttaagttttttacttcattttctagatcaaaaaaaaaaaaaagagagagagagagactcatgatacttgtccatctctaggattatttgtaggtttaaatgaaataatgtctcagaaagggctttgtaattgtcaatttattctcagtgttgactgcttacctgccattgctatgggaaaatgggaagctattaaaatattcaatcttgatctttattcttccctttgaaaccaacagggattttgggtgacagaacaaagaacaattttaagtgaatattgagtagacaaatatgcccagattgtttcaaatattacagaagaaattagaaaccaaaatgaaaaattaaaaaaattccagaacaaggaggttttctttatcagaatttgttgattattcattttggaatttgagtagaaataaaattcctatgaatacattattttcaaatatggattaataagaacaggagaataaagtctttggcatcaatttctggattccttacaatatccccccaacttatcaatcacacaaggagttatgccctacagaggtgtttgtgaaagtcacaggcaatgagtaccaacataaaacatttggattctcatgtgcaattgacgaaggtcagctaccaccaaccagttcccttcctgtcttcctctgtccctctttgggctaaattccttcaagatcaccttgcagtcagcaacatcttcctggtaatagcagataattcttactaaacactcccaatgttgccactgttggtatattggtatattgttgctttattggtatatttcatttgactctcacaataagactacaaggtggatgtagtagcctataaatagccccccaaaagatatccatgtcagaatccctggaacctgtagatgttcccttataggcaaagaaaagggtctttgcagatggggatattattctagattatcagggtggacttgaatgcaatcacatacatccttataggagggaggtaaggctgggtgcggtggctcacacctgtaaactcagcactttgggaggctgaggcgggcaaatcacctgaggtcaggagttcaagactggcctgaccaacatggagaaatcccatctctactacaaatacaaaattagccaggcatggtggtgaatgcctgtaatcccagctactcaggagactgaggcaggagaatcgcttgaatccaggaggcagaggttgcagtgagctgagatcgcaccattgcactccagcctaggcaacaagagtgaaaatctttgtcaaaaaaaaaaaaaaaaagagggatgtagaggaatatttgacatacggaagaggagaaggtaatgtgaccatggaggaggcagaaattggaataatgaggccacaagccaaggaattcgggaagccaccaggaactggaagaggcaagaagtggattctgccctaaggcctctggagggattgtggccttactgacaccttgatttcagctgataaaattgactttggacttctggcctccagaattgggagagaataaatttctgttgttttaagccaccaagtttctaatatattttacagcagtcacaggaaactagtacagcacacattaatatcatcatggccatttatataaggggagagccacatttgagggaagctgagaaactagaccaaagtcaagtggcatagtcaaaatttgaattctgaaagtcaaacttcagagtcagcacttttaactggtgacccttaacagtccataatagtactgttgaatgctggcccagtgtgcggcacctgtggtgatcacacatggtatcattactggtttcccaaatagtcattttccaagaccttgggggtaaagaagagttctacactccttccctgatatcactcagcctttgggtagtagagaaatggaatcaccatcctatttccctccctacctgctatggtctgaatgtttgcgtcctcctcaaattcatatattgaaacctaatcatcaatgtgatgatattaggaggtaaggcctttgggaggcaactagatcatgaaggtgccgtcttcatgtatggaattagtgcccttataaaagaggctccagagagctgccttgcctcctttcatcgtgcaagaatacactaaagaagcgtcatctatgaaccaggaaatgaatccttaccagacacagaatctactagcaccttgatcttggtcttcccaggctccagaaccataaggataaatttctgttgtttataagccacctgatctatggtattttgttatagaagaccttgtgaactaaggctctaccctttcagtttccagcaaagcatttagagcttctagatacattcagaataaggggagtttgttgaaggtgacactagatcctgagttagcagaaactcatacctctagctataccaatggatattattacaatttcttgttaagtactgtaattagtcatacacatgggtctgaatcatctcttggcctaaactatcatttcagtttctccttaggcaagggaaatagtgcaactgctatacacaggtggatacctgtgcatcatgcatacatacctatatttatttacatatccattgcagctcacaaataaagatcccaatgataaataatgactacctatttagtgatgaccatttatgggctagggtctttatacacatccttacttacttgaattttcacaatagtcttgtgaaatattgtaatactgtctcttttttttttatagatttgaaactccccaagatcactaggggaaggggtatttaaactcagatttgtcttgcaaaccacatgtttctaatcactcaacttttctgtttttctattttgcttccttacacaagagtctattagaggcgtgctctctctctctctctgtagaagtgttattgtgtgattaataaaagacagagattttggtttatcttcaccagtggaaggctttgatacattactcaatgttctctgtggtatcctatattggataacagtctcaagctcaaaattaaagatttctttagatcaaatttgattgcaatcaacaaaaatttacctaattaaaactttggagagatttctcaggttcttcaccatgggaaaagggctttgaaagcctaaagaatgaaaataaggcatttcccatcatgaataatgatgtgaaattgtcttagaaaggattttttttgttgttattgcaaaggatagacacctactaagtcagcgaaacaaagagagggaatgcataaagaagcacagttgtctaactgaacccagaataatgcaatggggtctcaggagaaaaggtatccactacagacccagctcctagaacaatgcctaatttaaagtcagggttcaataaatacttgttgaatggaagaatgaatgatttctaaatttctaggaaatagaatccactttgctcagcttgggtcaagtgttcataacccagttcaatcagttttggccagaggcagaattatatagggccctggtgggaggagagggtgtgtttctcagagaaggaaggaacactgtgactgagaagacacctcaaaaggtgacaaagaagcaatacctaccttgcctcaatggagggctgagtcccctttcgagtgtaacaacatggccctgttagggaaagtgtcgtaaaattgggacaaggtagaggtagttgaacagaaaagtcatcttgatcatattttgcctttatacttttgaatattggaacaaatgaaatattctgaaaagatgaagagaacacttctttgtttatggaactaaccaactctgttgaaagtgtcatggatgtgtgtgtgtttgttttgcccagtagggacaatgttgttaagggatgccatggtgtgaatacctgtgtcccccccaaattcatatgctgaaatcttgctccctcaaggtgacagtatttgggaggtgattaggtcatgacagtagggccccgtgaatgggattattgcccttataaaagagaagccccagagagctgccatgcctcttctaccatgtgaggacagaacaagaagttgccatctatctgaaaacaggccttcaccagataccgaatctactggtgccttgatcttggacttcccaaccttcagaactgtgagaaataaatttctgtttttcagaagccacccagtttccggtactatttttttttaatagcaccctgaatggacttatatatggtgctactgtacaaggcaaagattaaagtcagggtctatgtttggggcagaaacacctaattgacagtttgcaggctttgattagctctagagaaaccacccgaatctgagcttggtcagggagaagccatgcttctaaggacaaacaggacctctctcagtttggtcattgcctactttcttggctcctctgtctttgtttatctcccccgactccatcctcagcacattcacaaatgcttcagccatactaaatgtctcatctttccccaaacctctctattcttccaggcatccatgtcttaactcaagcttttctctctgcctggattttcttatcctttgggtgaacaactacttacctttcaaggtttcacatttagtcacccatgaaatctcctctgaccttctctctacatccacaaactcccccttttatactcttcgttactatagaggataggaagacaaaaccatattctgagaaattcttgcagtaagctgatgtgaccaaggtttgaggaaatggctttgtttacctgacacgtggaggtagaagtgagaaacaaagatggaggccacatacagggaggctgtcctggcaagcatgatggtagaggcatttgattcttctgaaaccaggtggcagctttgccagtgttcagtctctggtattatagcctctagcaacagagagtgtagaaatagggatactgctaggatagtcccgaggtgttgatgacaaggctttttgtttttttctggatgtgtaacatccaagcctgactctcttggaaattctgcaagctgtagtaaattagtaaattcctttgtacttacactacagaggattctgtagtcttcaactaaaaactcttattgacactgcaccccagttcaggttttatatatttatatatacatatatatatatttatatatacatatatatatatatatatatatatatatatatatatatatatatatttttttttttttttttttttaagattgagtctcactctatcacccaagctggagtgaagtggtatgatcttggctcactgcaacctctgcctcccgggttcaaatgattctcctgccttagccacctgagtagctgggattacaggtgcctgccaccacgctcagctaatttttgtatgtttagtagagagagggtttcaccatgttggccaggctgatctcgaactcctgacctcagatgatccacctgcctcggcctcccaaagtgctgggattacaggcgtgagccactacatctaggttctagatctgaataagtgctgtgtttcaaatatcttggatttggtaagtgctgaataatggatgcatgaatgagtgggtagatgtgtctcaaagggcaatctctaattctctaggttccaagatagaaatgggaaaactcttggtgacagtaacatgaattgagtttgaagagccaggggctgagtgtgaagagcacagggcaactagaaggaagttgaggaaaagtagccttcactcctgccaaacagagcacaggggcagctttcattataatgtaaggtcatgctgtgtctacatataccatgttgattcactatctccagcagaaaaatgcctggttaatttcaatgaaaacaggtaaacttgatgcttggtgttgtgctgactaaacacgcagtgaactgacagaatcatattgaatgactggcttggtggcacatcaatatacagtcccagagacccagccaagtagaagggtgagaattggagatgagattgggtctgaggagtgcaccgcagggctagggatgctgagcaaggcttgaggtgatgggaggaaataaaaggaaatgtggctttcctattgtgttttctcttttcattttctatggcaaggagattgatagtcaatatgattgtatgttgtagctaatatatgcatagatgtagctatatggatgtaatcaccatattctatgacagtagttatctaattctctgtcccacctagcctcaattttcagaggggctcaggacaggcaggacaaatggaggatagtaaggagtccctgagccctaatggtcagtaggacggctcagatcacttgcagtcactgccaacaattctatctatagtccttaacttgggactttaattcattaggtatatttttgagaataaattactctcaccatgggaagtttttatctggtcttaacaaagagctaacttacacctaacatgctggacaagtgtaaatttaatttaaatttgcacacctcccttcccccacttactatccccagggagctgtgtgtcataactcaggggcaaggcatgtttgcattctggcatcacagtggcagaggggaaggagagagggctggttgggagttagcctgctgtagcctgctgtagcctgctacagaagcttccctagttctaggcagtgtcttgagcagggattcttcactgagggagcacatcagaatcatctatagaactttcaaaaactacacatactcatggacctttccccaatccagtaggtttagggtgtggcctagtcatttggattttgaaaaagccccatgagcagttctgatgtgcccctgttgacggagaaccactgataggcgcagcaatctcaggcctagttctgatgactatccctgtggatagggacagcatcatagagcaagatgtgaagaggagtccagttcagagggagcaggtgtactatgagctcagtctgcaggtggcaggaccccagaagcaggtaggggatcttagagaacagagcctagccttacaggagggaactgagccctagtccctgctggtattcaggttgaggctctcggtttccagcagaaatctaaactattggtaggaaccctgggactcaagtcccctggcgtgttcctcaaacacaggatctgctcaattgcacaggagactaaccatgatggccactgtagctgggaccctgcagcaagatctggggcgtggtcaagagtttcagagtgaggcctagggagaaggccatccatatccactccaaccttgtcagaaatggggctggtgaactcaggagggcttgttgtcagtcccacctggggaagatgaaggtggaggaaataaggcaagggttggcagtggttgtaaacagctggcccaggatggcttggttactgtcccagccagcaagtgcctccacagtggtgccctacagacacactctacaacttgggggtttgatctagatggttcgtttaagctcagtgtgttttttggggtttgtaaactacttaaattgtgacaaaattttgttcaccaggggttcttccctagaaagctgcagtctggttattctgttttgaggtctctgttgcctctgctgcaaaatcttatggcttgctctgtcttttgcctgtgctcatgcatttccggaatcggtctgttttccctggaaattatgcctgctctacaaaatgtgctgatttctctgatttgggtcatcttctctaggtcacaggtgctctcattgtctactactgctgatttgccctgtgcccatcctggctctcattgacagcttccacctgtttgcacactgtctacacttccgctgcctcatggttcattcccaactcttgactctgttctccatgggagggactatttcactgcagaaacccaattatttaggagggaatgaacaggcttcttggcatagaactgctaaaaagacccacttcccgctctttgagatgaaaaacacatgtttatttcctggtatctcaatttctggtccctgattacataaagttgtcagatttagctaataaaaatacagaataatcagttaaatctgaacattcgagacactgttacattaaaagttatttgtggtttacctaaaattaaaatgtaaccgtgtgtcttctattttatctggcaaccctatgactgaaagaaagtagctgaatttgaaagtagtcagaagggtactggaatactgagttacagacacacacacaaacatccctgatgagtcagattactttatggaaggtacttgggcaaatgactgctagttgttatccaacatgtattttcttcttttagtagaacttccaaacttattctgagcacaggaaaagagaagggtgtatattgctcaatatctcttgcagctagaagttgccagaagagtatgagaagaagtgatgtgtacaacttcaggattatgcccttagagggaagggccatactctccactcccctttctcactgattggaatatagacagggtggttggatctgggacaggtatcttaggataagagacagaggttgtgtgttgagtataggagctcaacaagatagaagagtcttcaacatcacatcagccctgcctgcttgcactgatggtttggcttggtgtccccacccaaatctcatctcaaattgtaatccccatacgtacagggaggaaattggtgggaggtgatagggtcatgaacaacatcggttcccccatgctgttctcatgctagtgagagagttctcatgagatctgattgtttataagcagcagtttctgctgtgtgctctttatctcctgccgccatgtagaacatgccttgcttccccttctccttccactatgattgtaagtttcctgaggcctccccagccatgcagaactgtgagtcaattaaacctctttccttcataaattacccagtcacaagtagttctttatagcagtgtgaaaatggactaatacatgcacataaactgttactggagagagaaataatctgtctttttaagccattgttactttattgttgttggtgatttttttttgttttttgagacagggtcttctttcatccaggctggagtgcagtggtgcaatcatggctcactacagcctcaatctcccaggatcaagcaatcctaccacctcagcctcatgagtagctggactacaggtgtgcaccaccaagcccggctaatttttgtatttttttgtagagatgaagtttcggcatgtttcccaggctggtctcaaactcctggactcaagcgatccacccgcctcagcctcccaaagtgctgggattaatggtgtgagtcactgagcccagcctgccactgttactttggcttttgtaggagccaactaactggtattctaactagcacaggtatcattgttgattctctggcagacatatttcagaattccaagagaccagatttgtagtgttctacaggaagctgtgcttttgtttgcattgacattccttttgcttattccacagcagacatggaagcaagacacaggtccaggatagggcgggaaagtggctttctcagtgacatttcagtgtgaatgagactgacccagggagtttgttaaaatgcagattacttagctctctcctttgggatgtgaatttgacaattctggcctgacccagagaatcagcatttgaaaagtattccacgtcattctgatggcagcccttgggccacactgaaaaaaaaactctggtctataagtggagcccttcaatatgcgggactcctgggaaatacttcagtgaattaactcaggaagattcttaactgctacagagatgctgttgatggtggtgtttagcagtctaggaacagcgccttggaaatgaatacttggaaatatttgatgggacactcagtgaaatgcagacatttggaaagttacaaagctttactctggatggcctgtaaataccacacacatgcactaattagataaccagacataattaaactatttggagacatgattgaaaagtaaatattttaagggacaagagggcaaattttaaacactccattcttcacgctcatttctttagttcacaatgttgactgagaagtcggggtaattacaagtggtaataatgcttgataattacatatttgcctctgtttacattggacatgaaattaggaaactcacttcctaagtgaacccttgtgagcatcctttcacagagagtgaagttcatatcacaatcaaagcaataagagggagtaattgtgacactaaccacaggaggaaaacaatcagggataaactttcagcccaaaggagtgagatggggactgaagagaggataaaagtgccaaccagccaaccagataaataataacattttttttgagtatctacattgtgcaagggccctgtgctaggaactatgtgggggtggggcagggtcagagagacactgaagatggagaaacttaaaatgtacctgggagccaggacgcatctgaacgcaaagttccactgtaagcgatgtgggagtagtgccaaatcagcacttcagggactccaaagatggagacgctggagagggtgcagacagtcaggaggagcttcttcaagtaggaagtcaatcaacacttatgagccgttgttggtgttggggatgcaaagatggccaggaaggagtccctctcctcaaggggcttccattctggtggagggagaccgatctcagaatactattactggatagaaatattgaatttgttaatcaataatagtaataattgattgctgttattgtatattgttggccagttggggtggctcacatctgtaatcccagcacttttgggaggtgggaggattgcttgaggccaagagttggagaccagcctgggcaccatagcaagaccctgtccctacaaaaaatttaaaaattagctgggcatggtggtgtgtgtctgtagtcctactacttgggaagctgaagagggaggatcacttgagctcaggataggagttccaggctgcagtgagctgtgatggtgccactaaactctagcctgggcaacagagggagaccctgtctcatgcatatgtgtgcgtgtgtgtatagttaatcacagataatcaatccatatatcagatattttctgatatggataagagctacaaaaaagctttgataagataaaatggtggaagtgagtggagctgagtggggtcagatggtggtcccaaaaggcctctctgaagagatgagggagtctgaggcttgaccctaaccaggagaaaatggcaggtgttgggtagctagggaaagcatttgcaggctcagtgtgccctctagatagtgaggaggccagcatggctgcagagtggtgagggaggggacagtggtggagaagggactggagaatagctagggcctggaggctggggaaggaatttcagggtttattctaaggatgcaggctattgtggagggtcttggggcaggagtgacatgatataatttgtgtgtttaaaaagaaaccattctggcagctgtgaggcagtaagccctggggctcaggcatggagctggaagatcagcaaggggctgttttggtggctcagggtgggcctggaaggatgtaactaggtggatgtaactaggtgaggctaaggggagcacgccacagggtggggacccagagcatgagcattgaggacaggagccagcagggtgtgtggggaaactgaggccaccagtcagataggggtggcagggggcgagaagagaaggcaacaggcgaagatgggcagtgccctcttgttgtttggggaaggagctcacgtgggaatttaacgtgagtggctgatgcccagagatctccataggaaagtggtcaggccttcacagagggtctttcttgctgagaaaaaaagtccagctggcctgtagaatgagggaggtgtgcacaggaagcaggcgctgacatgccatcagcccctctgcgtgacaggtgctggaattcagagcacactaatgtggtcacagccctcccgggtctggctcatcagcctcttcctttcacagaggagcacacccaagtccggggaggttttcaaaagcagcccagccaggaagaagccatgccagggtgaaaccgaggtctttctgactccaggtcggtcgggcttcctaaccagggcaccacagtctccatgctgaccagactgttttcctgcctgctgctattttcctgacactttcttccctttccaacactctcttctctttcctcttcaccgtgttcctacctagccaatgactactactatatatatatactatatatatagtttaaagtgtatatatatatacactatatatatacagtttaaagtgactgggatcttcaatcttaaatccaaccacaaaaacaaaaaaggaggtgtttgtccttggagtacatctctccccctggcaggggagaggccttgtgcacacatccactggacttcacacacgtgagctgagctcatgaacgttccctagactgtcagggctctctattttggaaggaggttgaggaatttgcccaaagtcacccagctgatgggtggaaattattctcagtctcgacaactcttgtgctttttggattttcccagcagcccatgctgctctgagccatttctcaagatgtctccttttccctcgtgttgcctgtaacactggtgacataaacctcacccttcttgccttactcccatctgagtagtgtctcagtgatgtgtgcctctatccttcctgtccctccagcctgagtgtggaaaatttttgtgactcccaatgcctttctaccccctgcatcttcttgccctcagcttctctgacatgttcaagaacaaacctttggcctccatacctgtgccttggagaacagatctatagcattaaaaataaacacgtggacaaacaaactgttccattgtatgctgctgtgttacaaatggcccctgagttgtgtgaaataatagccatgtttttaggctcatagtttctctggggcaagagtctggacagagtacagtgaggaggactcacctctgcttcatgattatctggggcctcagcagggaagacttgaatggctgcaggtaactcaagtggttggggactaaaatcattcttcattcacatgtctggcacctgactgggcctagctgggactgttgaccagagtggcttacgtgtggccactccacgtggcttgggcttcctcacaacatggtcgcagctagtcagacttcttactgcagacttgaggtttcaaaagtccatgttcagccaggcgcagtgactcacacctgtaatcccagtactttgggaggccgaagtgggcagatcaccttaggtcaggagttagagaccgcctggccaacatggtgaaaccccatctctactaaaaatacaaaaattagccaggtatgggggtgcgtgcctgtagtcccagctactcaggaggctggggcaggagaatcacttgaaccacgtaggcggaggctgcagtaagccaagatcacaccactgcagttcagccccgggtggcagagcaagattccgactaaaaaaaaagtccatgtgtccatgttccagagagcaagatgggaactgcatgatcttttgtgacttagacacactgtcatttctgacatactctattgttcaagacagtcattcaggtttaggtagaagtgacatagactccacatttcaatagaaggaatgtcaaagaatttgtggctgttttgaaactggcatgcaaataaataaacattttgtaaggcaaaaccgaacaagccccctgttataatttttaactcatcagaaaagtctccaaagtctaaaacagcagttcctaaccttttccacacaaagttctttccaatttaaaacacaacaaaaatctcccaaagaaatagttattgtttttttttagaaaaacacacactcatgacaaataattcaatacagctaaacacaaagaattaagcctagtccaaataatgtaaaatattcctaaaacctcatagtctagagataactgattgttaatttttgaagaatatcctttaagatatttctgtatgcatttacacacataaatgtatgaatcgttttacataaataggatcatcatattgagtttttctgaaatacgttctcctttttacactcaataacacgctacagccatttttccatttcttttttttcttttctttttctttctctttttttttttttttttttttgagacggagtctcaccctgtcacccaggctagagtgtagtggcgcaatttcggctcactgcgaactctgcctcctcaagtgattcacctgcctcagcctcccgagcagctgggatttacatgcacccgccactgcgcccagctaatttttgtatttttagtagagatggggtttcacgatgttgtccaggctggtctcaaattcctgacctcatgattcaccggcctcagcctcccaaagtgctgagattacaggcatgatccaccacacctagcccattttttcatttcaatagtcacagcagaagactattggtttctcacacagcagatattgtcccttctttttctttttctttctttctttctttctttttttttgaggcagggtcttgttctattgcccaggccaaatatcctcccacttcagcctcccaaatatctgggaccacaagcctgttccaccatgcccagctaatttttactttttttttttttttgtagagacggggtttgattgtgctgcccaggctggtctcaaattccttggctcaagcgatccttctgtcttggcctccgtacatgctgggattacaggagtgagccactgcaccagcctgtccctttctaccttcctaacaaaaaccctgttttaattcaggcatccattctcctttgagaggcaacatgtttccaggaaagcagacactatttctaatttctagtgtaaaagacaattgggcttagctaaaatagcagtccgttcccctggccagtgactgaggtaatgacagaatgtgacataattctggctaaagcgatggcaagactgatggcaggtttgggaaaatgggatccttggtgatacaaaggaataattaggaacagcctcacttctattcggttggtgcagaagtaattgcagttttgccattaaaaaccacaattacttttgcacctatcaaataccacatattgtcattcctgcacataatggttggaactacagcagtttcagatattgttgttttttttttaaagataagaaatgacttattgtttaatttgaattgattgagctgcatttttctgttgcttatagcccaaagtattctaactgatgaatgtcacacataaaattatacaaaattactttgaacagttccctattttattgtatggatatgccatcactaactctgtaaaattcccagttgcttgacatttaggctatttctttctttttattttttgctataataaacaacagtgatgtactttgactaattcaattttcaggcagtacttggtgtgtctatataacctccaccctctgacaataattagtttctaagccataagattggtcccactgaggcacagcttcttaaatctgactgttgggtctgagatgaaagcttgcagcctccaattatctccatttttcccccttcctccagtataaagagcatgggctttagaagcagacagaaatggttagaaatcctctgtcacttcctagctgcacagtgtcatcagtttccatttccctgctctataaaatgagaacagaaatacctacctttgttgtcaggactaaatgagatgatgtataataagcatccagtctgatgcctgatacacagtaagtgctgaaatggtcattattttatattttattatttatcatttggaagaatatgtgtgtggaataacacgaataggagctattacccttaagaagtgtctgtggaatgctgtttgctttctttccagagtggcaagacttcttgctatttttttaactttttattttgaaattactttagatttatagaagagatgtaaagatagcacagagaggctgggcgaggtgactcacacttgtaatcccagcactttgggaggccaaggcaggcggatcacttgaggtcaggagttagagaccagcatgaccaacatggtgagacccctgtctctactaaaacacaaaatcagctggatgtggtggcgcgtgcctgtagtcccagctactggggaggctgaggtgggaggatcacatgaacccaggaggtagaggttgcagtgagccaagatttcaccactgcactctagcctgggtgacagagtgagatcctgtttcaaaaaaaaaaaaaaaaaaaaaagttcctatataacttttactcagctttccctaatgttgacatcatctttggtacatttatcaaaactaacacgttaacattggtaatattattaactaaactacaaactttatttgcatttaaccagcttttacactaatgtcccttttctatcctaggacacaatccaggataccatgtcgccttcgggccagctggtttttaacggacttacagccctttccttggagggctgagttgcacacttctgctggaaaattagccagagctaacattgattgggtgcttaatgattagcccttctcataaccctatgtattccattcctgccctcattttacagatggggaaacagagactcagagaagtaggaggcttgatcaaggtcactcagaggcagagcagacaccgatgaggcagcctggttcctgcttagttgcctttcccagaggaggatcccccctggccctctccccagagcctgtcctccctgtgtggccaggaggagagaggaggtcctgcagcagggacagccttgcctgtgggcagagctaactctggctaaaactgagcactttctgcccaccgggccgggctctgaattacctcctcgctgcctgggcaagggcccgccacgcccctttctcccactcccttccctgtcaactctcggtctcaaggaagctgctgctgtcaatcctatccctgtgcgtttggccacaatgcaaaggcgcctcctggtgtttgcatttgaatagagacccaagcccgaagtcaaacaatgaggctcgtggtgggagtgggagagatttggggtagagcgcattcttgcagccccttctgcgcctccgtgaaggcagttctcttctccactttctcagaagtcttatttctccacttgctggggctacccctgctcctggggacaggaaggggattgcgtttcagccagggccccatctgcacagcctggggtcttctggcttcttcatccaggagcgctgtccactgccaagtgggaagaaggcagccagaactaaagcttgctccctgtgatccctgtgccatcaccaccgctatctcctaggtggcttctaatgacagctttcacataggaacaccttctgtgtgcctggcagctataggtacatggatcactttatgtgataaggaaatgggggctctgagctacttagctggtaaacggcagagcatggcctcaaactttggcctggcaggctccaaagtccccagtccttccagtataccaaataccgtcatgattgttttggaaacagggcccttgccaaaaccagcctcaagttcctggtgccaggagggccccacacctttctgggctaggcagtgtgtgggtcccgcctccggaagaccaggctggtgataaagcccctttctaaggcacccaaagggggctttttgctgagcaggcaggtgtgccatggtaagggcccacatcctgtcagggatggggtatttcctgattcaggtgacacagcttaaagaaggctgataatgaactgcatctctatttatccaggcaaacttggcctagctgaggtgttaactgggccatggaacagctttaatccttttgtttacattgagatggttcagtgaaactagtactgtcttaagctacaactgcatttcatcttcaggtctgctctcaggactgacacagagaccagctttgggtggaaataatcataacattcagagctgcaacctggggtgattcatctcagagtcaccaacaagatcgcatgctttttggttatcatgagtggcttcagggcgctggctgggcactggcagtttccactaacgaggacaaataagaacagtaaacaggtgttgagttattactatccaccaaacacttaatgtgtatgaacttaattgatccttttaacaacagcaaagtaggtgtcattattatctctattttttaggtgaagaaactgaggtacagagagcttaagaaccttgtgatgggcttcaggacattgctgcccccaaatatggcaccttgatatattgaatgtttcaagctgaaggaacttgagaaaatggcagatgcagttaagttcacacaacccttaagttgcagaagagggagttgaacccaggcagtgtggttccagagtccgggcatataatcattactctgtgtgcagataaatagcataggcagaggtctggagggacatagaccaaaggctgcatgctggctgtctacaggtgatttcttttcttttctatttatttgtcttcccttatttttgacaagttttgaggggagcaaaacgttaagatttacactagacaaaaggacaggtcgttagtgggtgtgagttgcatgggacaatgtactgggctccctcctgggggtgtccacagaaagccagtttggaaagacactatgacacaggtggacagaaggcagacaaaatcactgatacaaaatgaagggtttgcttattaactcattcacgtattgattcaattattcactcattgcttcaaaaaagcatggagagcctactctgtttaagcattgtagtgggtgctggggataattatgtgtaagacaagatccctaccttctaggggttcatagtctggaggcggaggtgaggggaagctactttcaactaagcacctagtaacttgttaagacataaagtaatttgcaagtctgattcttccacaaggttttgaatccttgagggcagggactggtacaatactggtatagccacatatttcaaccattgatgcattccatgcatgtattcatgcacttttacattaccacttggtgattgaacatacatagggtgtacagtgaaggaacagcccacgtgattgtttctccaggttgaaggagggagagaagagggtggttggaaaaatctccatagagatttgagcagaggcttaagaactgagaaagtttgccaggtgcagtggctcatgcctgtaatcccagcactttgggaggctgaggcaggcagatcacctgaggtcaggaggtcgagaccaacctggccaacatggtgaaaccctatctctactaaaaatacaaaaattagccagacatgatggtgggagcctgtaatcccaggtactcgggaggctgaggcaggagaatcgcttgaacctgggaggtggagtttgcagtaagccgagatcatgccactgcactccagccaacagagtgagactctctctaaaaaaaaaaaaaaaaaagaacagagaaagttttcacccagtggggaaggtacttccagggaaagggaatagcataggaaaaatcacagtggtataaggctgactggtgcatttgaagaactgtcaataattaagtcccaggagctaggacttaaatgtaggtaagttataaggacagagaaccaaagcagagagtaaggggtatatgtgcagatggagcctaggggataaggaagcctcctccttttcctccttctcttctgtttaataagccctccccctactcttttggaaaggagtgaaagggtaggaaactacatctttaagcatctatacatgccaagccctgtagcatgtataggaaactacatctttaagcacctatacataccaagccctttaatccttactttggcacaattcaccagccccattttccaggtgaggaaactgaagctcagaatggtgaagtgacttactcacacagtcagtaagtggcagaaaaaaggtttggattgaagtgcatccgattccaaaagcggcactctttgtactgggccagacagaacaactgaaagtggaatcacgcttttatctctgcaaaatgctttcatgtacctaggctcatttgattcttaccatgatattgagtagcaattggtcaagtatcataatttccatttttttcagtaggaaaactgagtcacacagaggttcattttgagtgatttgagaatttcagaattaaatacatccaaagtaccaacaagaggacccagctgaaaaactatacatgaaatgaagatcagccctgagatggtttctcagtgcaaaggggcagctgaggacatgacacatgtgcacatgagaaccttgtgtgcatgtggaggtttgcagctggaacagccggaggggccaatccaagtggctgagctaatcctttcctctgccttctgcctgcttcccctgtcaccttaggggcccctcctgaggggacatctgtgaattctccatggaatccctcatttagctcccaagacccagcgcaagcctgggtgcagaatgttggtgcaattttgacaagatgctcacagaggttcagtgactagttttaattaggccatctttgtttacgtttgatgtttatcagctaattggcatggcaaggtgtgagtcacacagctttcccctggcatggaatcagttgtcagagaaaaagccaggagaacaaatgatcccaattatgagagaacccaccgggctaattatcgtcccactaaggacggaaccttccccctcctgctgctcctgctactgctgtagctgcaccaagtgccctgggatctctacaccccttcctccagccccagaaacccagaaaccaggatctgggcccccagctggctgcctggagatttattctctcaaattcaaaacttgcatgttcctctagctcagacacaccagggcaacattcttcctttagttcaagatcattttcctctttagccccttccataaatgattgctcatgtatgttggacttttcctgtgtgcaaggcactgttggaaatacctgataattattttccccaataacgtacagtcaggtcgcattattatctccattttacaaatgaggaaactgagttgtgcagatcttaaataacttgtttgagggcaagcaatagggctgggatttgagtgacatgatctatcaccatggcacctgctcttgaccatcaaatgactcttggatgctcagaaagccctaaaaatcaaccaattaggattcttcaggtggatttctgggtccactctccctctaattatgtaggtacaatcgccttctagaacagtgctgtccagaactttctgcaatgatagaaatgttacactgtcctgcccaatgcagtaggcagccactaaccacatgtgaaatgtggcaagtgggatggagggactaaatttttcatttcattttattttaatttatcttaattttaattgaaagagtcgcatatggctagcggttaccttgccggaaagtgcagttctagctggtcagcccttagtcctcaaatgctgcaatttcctaatcagtcctttatgtgtgtcttttcctccccctcctccttctgcagcttcctggctttcttggtgcagggcaggtctcttcattttctgcattctctcctgcccattctctaagccccctccaggctgaggggcttgtgcagaggaatgcagtttggctgcccttgagttgaatgatgatcgtggacctttggaatgtccacaaagcctcgcactctcggcctcccctgtctctctccttcgccggggtaacagatggccctggctttcaccagccgggcctgagcacattgtcactcccagctgaaagtgaaatattcagtggcatttaaattaaatagactctaatgcttcagtaatattaattacgttttcattcatccctggcctaataaatcaatgcgtaaagagaggatgctcgggaggctggcagcctagtggggccactggtcctttgtgtgagcccgcacacaatgcccccattcttacggggctgcgcttgcccctgcaaacatctgtgctcagcccctcttgaggaggagccaaagaggtaacatttacactctgctcctccaatttgtccctgcaccagggcctgagtcaacgggaaatgtgaaggccacactgaaaaccacattcagagctgctgctgctgctgctgctactactgtgtgtgtgtgtgtatgtgtgtgtgtatttgtgcacacatgcgtgcacatggagctggggggtttgcaaaattctgaggcagagattcagtgaatggagacaggagtctattggtgctgggacctcacttctagctgcaagattgtgttagttcagccttaacctatgagaagaaggagaaaaggaagaaagaaaggaaagaaagaagaaaggacaggaggaaggaaggaataggaaggggaataataacagctaccattgaatgagtgcttactatgtgccaggaactgtgctaaacacttttatgaaaattctcttatttattccttacaacaatttataacataacatagcaactattattggcccattttacagatgaggaatttatctatagttcagagaagtttgggaacttgcctatggttccaggccatgtctgtttgattccaaagacaatgttctttacctctaagttctacatccatcagaagaaaatacagaagaacagaagagatctctaaggctatggtttgtgtagggggcaaggggccaatgtttgagaaatttccaacattccccttggtttctgaggttttttgcctgtggggaggtccatccccaacgagcaatgtctccacccccgctccagggctatacatatgtaaaagaagccaataaaacaatccaagagagcctgctctcctaaatcttcaggggacaaaacctcctacttgtgatgcttcaaagctgtccagagctaccagtttacccccagaagtcccgactcaatgcctctgattggaaaataaatagctttgcacataaaaaccacaggccaattgttagcctaggaatgggaaaatgctgtgtgcatcactgcgtatcagccctggagcctcactcctccagggaggcagcctctcctctaggagatggcccaggagctgggggtgaaggcacttgtaaacatgggagtttcaaaaatgattccttaggaagatttttaaaatagtcaatgttaaaatctacaagaaatcgtgtttcttatagaaaaactagaaaatacaaataagaaggaagggcaaacatcagctgaattcttccacccagagttaacacttggtgtttttttcctctagaaaactcactctatcactacttggcaaacattgggccataagattcaaactgttttgcaacctgctttcccccaccatttactgtgatccaaaagtcttcccatggcattaaatatgtctctccaacacagtcttcttaatgacaagttttgcaacttataggtaaaacatggtttggttatttaatcagtcttcaattattggacatttggacaatcaaaccagaaagaaaatagaaaccggggttgtttctattttttttcctcccacaaagtttactataatgattttccttgtggctaaatggtagagcacgcacattcccacttactctcttagaataaacaactgaaagagaaattgctaagtcgaagtgaatatgcatgcatattttgagggcagagacactgtctactataatttgtaaaaaatgacttggaaagctaaatctcagcttcagacccaattcctacccaatgtaaatattcctactctctgatgcttgaggctggtttgattgtacaaaaccaagtttggaactttctggtcatcttgttggtaggttaggactcagcacttgcagcttcattgtgagggttcttgaacctcaaggtagaactgacatcattaatgtcccacaggaagcaactgagtagagtgaccagcctgtgatctctggagtcagcctagatttaacaccagctctgcttctgactggctgtgtgccctaagggaaattacccagtctctctgggtctcagtttcttcatctgcaacctagtgtgtgatacttgtatccatcttatttcagtgaagattaaatatatgtaaaacacttagcacagtgacacgtggtaaatgttcagtaaacatttgctactacgctgttattatgttgacccactaatgagctattcaaccaacctcttagttattcaagtcttggttttttcttggagccatcaggagagaccatgaattgcaccctatttaaattggcctatatcacacagaaggtgatttaattcaatctaatactgattgaggtcctggcacgagtacggccctgtggtagcaagatgaatgtgtccccaggagctcattggctagtgggaaagccagaaacatgcatcggtaactcagatccaaggcagcctgttgccagcggtgtaatgagaggtgcaaataatgcatgtggatggggcctctccagtggcatcaatgggaggaggatttgaagtgatgctcagggaggtccaatcacttgtccaaagtcacacagttactaagatgtggagctaggattagactgtaggtctgtctggtttaaaaaaaaatcatgcttgtttcctccatattaataagcaattcaaggtcaaagtcactctagagcagactagggctgtccagtagaacttgcttccatgcatatgctctatatctgtgctgttcaatatggtgaccactagctacacttggctactgggcacttgaaacatggctagtgtgagtgagacactggattattttaaattttatttaaacatggctagtggctactatgttggacagcaaaggtttagatggaggaactaatttaagagaagggctaatgttaaagatcaaactattttttttttcttgttatgagacagagtctcactctgttatccaggctggagtgcattggtgccatgtcggctcactgcaacctccacttcccctgttcaagcaattctcctgcctcagcctcctgagtagctgggactacaggtgtgcgccaccacacctggctaatttttgtattttttagtagagacggggtttcaccatattcgccaggctgattttgaactcctgaactcgtgatcctcccgcctcagcttcctaaagtgctgggattacaggcattagccactgtgcccagcccaaactttttaatgacaggaaagtgagagattttaaaaaataaaaagtaaaaataaaggcagactctaatttgaaaggaactgttaataaataaataaataaataataataataataataataataataataatgttttcatggaggccaaatatttttccacccttggaggaacacatgcatttggttgacgtgctctgaccatgccatgtttgtggctctttgtcaaacagtttggggccaagccaaagcccatggggagggctccctttggcaaatgcattccctcttcttctctgttttgtatttggcattaaactgagtaactgtctcatgctgaaaccaccacacgtatctaattcccattttgttctctgtcagattcaggcagagagctgatagaatagctgacactttcaagtcagagaaaacttcctatctgtacttctcaatggttggagctgtgcaaagacacactaggcagcctttgtggggggagggtgagtctcccatcaggagaagtgttcaagcatgcgttgaacaatcatgggtatgttgtgtcaaggttgcaaacgtcaaaagagagaggagaggtagttggaataaatgaccctttatgttatttctagcctctaaagtcagagcctttacaaagacttttgtacaaatgattttgctctgtaaaaacccttatctatctataccccatagccaaggttagactggtaattctctgaggtcaaggctgtatcatagtcactaccgtgttgttgaactagccatggtacttggaacatgagaagtgttcagtaaatactggttgttgtggttgagagaacactggaatcttaatgtcttaacctaaatattaaatggtagtcttcatttgttttgatgagagagtggatgcgaagtaaattcaatgcaaatttgggtctgatctccaaaaggaccaaacaatcattcccccttgtgtgctcagtcctgtgagattaaaaaggtagggcgagaactcacaattacacagtgtctaccaggtgctgagtactgtggtaggtgcatttgcatatatattatagtataattcccaagacaaccttggaagaggaattactgtcccattttatagataaggaagctgaggcttgacaaggaattattacaaaatcccattgatagtaagtggctgaggtaacaaacagtcaacagcctttagttctaccctaaactaatttatgtagcagatgttacataggagggatcactgaaggtaaggacatgagactgaagagacatcttgggcaaggttatggacatcttcaacattggagaggtgaggagatgccttctgcctctttgccagagagaccaccatgtcttagtgaatcagaatgatttaggaccatagtagataacatcacctcctcatctcacccccttgcccaaatccttacaagttcttatttgccaatgggaacccctcagattggcttctctttctctctctctctctctctttttttttttttttttttgagacagaatctcactctgtcacccaggattgagtgcagtggcgcgattttggctcactgcaacctccgcctcctgggttcacgccattctcctgcctcagcctcctgagtagctgggactacaggtgcccgccaccacacctggctaatttttttttgtatttttagtagagacggggtttcactgtgttagccaggatggtcttgatctcctgacttcatggtccgcccaccttggcctcccaaagtgctggggttacaggtgtgagctgccgcacctggccaggttggcttctttacacttctaaggaattacttcaaatgcaagacctttttttctcagtttcttttcattggccaatttttaaagcccactgtagatgtattaaccaagactctttctgttacaagtggcagaaatccagttcaaagaggtttaattacaaaagttgttcatggtgctgaatgagcaagacttcatggatgcctggatatgggtgctcacatgatggtattccaaatatctctcaggtgtcttttggctcttctctcctgttttggatcccttatcaggcatggtcaccagcagttccagatttacttcttagtatcttcagtagaaacagcgaaactttcccccagttgttctaacatggaaagaaatgaagcacatgaaacaatgttgaaactatgaggtttgcactggatctgatagatgtcaagtactgctgtgtttctcttgaaattttaaactctccgaggcagccctgagtgttctctgtggcatctcagtgtgcttcatcatacagtttgggatccagtgttgttgggtcactgtctccccttgcctgacctgctgctgctctctgtcctaattcctggcctcagcccttcctgtttgtagagtagtattttgaatctcatcctcgatttttattaatgaatcaccttaagcaggttacttgttctttccacacctgactttcctcattggtaaatggtgattgtactatccaccttggagggccattgtgagaattaaatgatattctctgtttaatatgctgagtgaagttccccaaacacaatcagtattcaaagttgcagctattattctccttgtctttcttctacatattgttattactatcactacttggagcagctatattagttggcattaggcttatctgtgaatggcagtaaaccccacacaagtagcttaaagacaattggaggtttatttctctcacatgcaaatatccaggaaggtggtccaaggctggtgtgatgttacctagtgtcaggagtccaggctctttctgtcttatttatctgtggttcataggtccattttcaaggccacctcatggcccaagtgggctgctctagatccagctcttatgccccccttccagccagaaggaacaaagaaaggggaggagaagttcacactccctctcttcctggaaggtgcacaccccaagcctatacaactctcattgccagagcttgtcacacctagccgcaagggaaatggagaaatgtagtgttattctgagtggccacggtgcgcagctcaacgttttattactatggaggaagagtaggctctgccactgcaggactagaaaaggaccctagaagctggactgaccccagatgatgcagctccgagaaaactatgcttctgcttaaagggaaatactgtacatcttttgccacccgaggaatgcaaaattcccttgggaatttttaagaaagctggaagttaaaactcaagtgtgaagctctcttccctgagccaaggagcttagttcagtctttctcctctgattgccagccggggctggggagaggcagagcactggccccaggcaaacttggtttgaggccaaattccaggactcttggggctgactggcagccactctgtctgagcaacctgggggatcctgagaaaagaatgaacatccgaatcccagaacaaaatcagcaatgatgatgctcctgcagcccgggtctggctgggaggccacacagtggggaggatgaggtcatggtgacaaatgagagaagggggagggctctagagtgcagcaagtctgcccaccagccagagccgggtgctcagagcaaagccagcccctctcttgtctgccactgctctcctgtgtgatcgtaggagagtcacaatgtttttggacttcagtctatccagtgagaagataggaaacacagcagcagcggctaggttcaggaatgtccagaaagtgaatagaattattaaagaaaaaggggcttggttgctaggggtttgggtggagcacagaggatttttaggtcagggaagcttttgtgtgacactgtaatgatggatgcatgacattacacatccttaaaacccttaggaagtatagcaccaagaggcaactctaatgtaatctatggactttgattgatattgacgtgccaatgtaggtttatctattgcaacaaatggactactctggtggggcatgttgatgatgggggaggatgtcggagagtgagaggagtatgttgaaactccgtgtattttctgcttcattttgctgtgaatctaaaactactctatcatctagtccaaaagcctactttagggctataaagacaaagtaatcagatattaagtaaatagtgatattttatcaaggatgatgtaataaaagagattaaggagtccccccaaacattcgtgtaccatgaaattgctcacatcttggtgttgagtggtcccgtccattcgatgggtatggtagtttaatttggaacttggagggaggaagtagacaaaaaacactgcagttgcattttctgcatcgcattggtatacttttaggtcattccaagatcactgccttttaagatttaggagatacagttaccttttgatgatctgcaagtgcttttgttcagcatgtaggtttcctgctttttgaagaaagccaggattatatattggcctgaagacagtgcagcaagaagccctgcgctagcgctgttgtggctaaaatggtggtggtgcatctactgtccaatagaactctctgtgatgacagaaatgttctaatttgtacttctctgatgtggtagccaccagccacgtgcagatactgagcacttgaaatgtgaccagtgcaattgaggaactgaaaatttcattttatattaatatctttaaactacaaatttaaatcattttattttaataactttaaattttaatattttaatacttttaaatttacatagccacacatggccagtggccactatattagacagcatgggtctagggctatatccttcagtagtgcttttcctactcacctcatggtttctcaggagtttgctttgcacgtttctgtgtgtctgtggagaggagggaatcatgtacaggaatgctgcaggaattctaatggatatgccaaaggcttaccctcaacccacaaatatctcagacccaaaatgctggagcatcctactacatatctacctttcacctaaaaaaaagaaaacatacaatggaatccaggaaacaaggcagggattatgtagaatttcttcgctgtatatcttgttttaaaaaatacgtcattacatttatagttgtattatgtataatgggtcatgggatcaaactgaggtctaaggctagtcctggcttttgtgtctttcaggatttaggagatacagttaccttttgatgatctgcaagccctttgcttgctgccttttttgctttgcttgcctttgctactaagttgttgtctggcatgtgacagccctcctggatttcactttccccatggttagtaaataaaatgggataaacaacccgtcagctctctgatattatctcagatctgaacagaatatattattttttattaaaaaatatggagacagaaaactttactttagactggtctaaatctgtagcagattattcaaaatgcgtaccatgttctgcagtatgttgcaaaggagaaaagggcgctgtggtgcaaccagcttgggatacacaggttaaggttacataggtttcttgattttaggactcctcaaagcctttaatattctaatgtgcattatgacttttcaggtggggaatccagctgctgcctttctcaaaagaccctcaaattatttctgctggaggagtgtcttccaggaaggactaatggtttgtggaatacactttgggaaatgcttatcttgaggcagcatgagtgttttttcgggactcagctgtctccccaactttggcctgtccttgcctgtcatgcggggcatgcaggaatggaattctgcacatggcaaagggctgaatcctgcttttcttcacacaggtgcagctccccacagcaccagctctccagctgcccccacacagcctgttttgtgctagggctatcgcgatttgcaaattccttctctagctcaagtgcatggacccagaaaatgcccctgcttgagggccaatgttgaccaaggccctcagcagtaatgtgacctctgtgggagcagcacctcgcagagggcagagtttggctctatgcttgtaccattggtggtaaattctgctgagctctatggatccatctggatgaaaaggtctgtataaatgcaagatcattatcatcatcagctgtcccagttggagcctactgattctcaagcccacagtcaatggggcctttccaacaattccattgtacatggcttggaaaaggtgtaattacacgaagctgaatatcttctggagagacagacacgttcatgtctgtcccaggagtgttggagaggaatctctcaggcctctcattaggcacatggagagaggtgccctccaggcctggcccaggtcagggacaagtcagaagctacatctggagcagatccaggatcttatcctggtgcacacgaggggccagcatcgtgcttgcacatttatagctcaggtgctctctggtgttaccaggaagctgctgggaagagacggaggccggagagtgtcccaggacaatgcttccttcactcatgttcatttttaactttaaaaaatggcctccatgatccccaaaatggtcttttggtgtgagggaagtggttgctgtaaggaaagtctctgctcgacacacacaaaaattctcctccatgactttggaccatgtctctgataaaaagactggctgggtgaggagtccagcctgcagacctcccatttgtcctgagtcctctgttgcagtggtcctcaatccccaggttagggatcagtaccagttcctcttaggaactgggccgcacagcaggaggtgagcagcaggccagccagcaagcattgctgccagagctccgcctcctgtcagatcagtgatggcattagtttctcgtaggagcgtaaaccccattgtgaactggccatgtgaggtatctaggttgcatgctccttatgagaatctaactaatgcctgatgatctgaggcggaacagtttcatcccaaaaccacccccgcccactgtgaactcagagagcacctcagcctatggtcaggtaccatctacagcacttgtgccttaaacacccatcagcagatatgaagatttcccaaagcatgcctcaatttagggttgtgcaaactagtgtagcctcttgcctataaatgaagactaagggctccatccaaccagctcgcttgtctgggtccagtctccagaactcttccagcttccctgtagtaaaagaacacaccttggtgggcattgttcatttatcagtgcacagggccacgttgacaaagtcttaatatttaatggcttacgagtctaataataaaaaaattaaaactctatctctcgttgttcttaaaaatgagcctgatttatcccattcattaggctcttatgtctctgtctggaatcaagatgtcagatctttagcctaagtaacattaagagtaaggaggataatgcaaataatgcccaaggttgcccttaaaaaatcgtaaagaaatgaataggctatcccagctttactagcacatatttcacaagttgtgcttagcaaatacagtcctcatgagtgccaccttttatttggcagtaaaacctcctctgatcccatctgcaaacccagtacttagcatggaaggatcccattagctaacatcatctggctcaggagcgccctctccaggtgctgattttcattcatatcccagactaccaggattgcacttaaggtgggtggatcacgaggtcaagagattgagaccatcctggccaacatgttgaaaccccgtctctaacaaaaatacagaaattagctgggcatggtggtgtgagcctgtagtcccagctacttgggacgctgaggcaggagaatcgcttgaacctagaaggtggaggttgcagtgagccgagatcacaccactgtactccagcctggcaacagagtgagactccgactgagaaaaaaagaaaagaaaagaaaaagataggggaaggtgaggaaagggaagtaattatgttattttgagtctagtaggcactggatgaggtgctcatatgtccttccttaagcctcttccacttgaccctcaacacctatccaggaagtaaattttattatgctggttttgcagatgaggaaactgaagtttgcaggcattaagtaaagaatccaagtttccataaccttggaactggaattagcaggatgctgggattaatgccaggatgaccagcttctcattctctgttcttctgactatcccgcacatgcgccctttgccttttttgtctatttctgatgttaccactcctactcatgtgacctaagttagtagttatttaatttctcctaacctcagtattctgacctattcaatggaaatagcaatatttgttccactgccttccttgattgctgtgtggagaaaatgagataatatgtgagaaagggaaggagagaggctttctctgcttctttctaaaagtttcagaccagttctatccaactcagtccaggaagggagaatgactaagtgtgtggagagaatgctctgggtgagtgtgattctagagtaacacatcagctgtttatactccatatgagcacatctcaaggtatgggaagtttgttgggtttttttgttttttaaatcccacacctttaagatgaaattctgtcccactgagaccctgctgagcagaaaataataggtatcaaccacctttcctcaagcttcctccacctgaagcctgagagcaatgtggctgaagggggacaggaggtgtgtggtgaagggatggagaggtttctagcttgaatgattttttcactaggtcagctcgtggcctccgtgacagtgggggtgaaattattaaaacagaaacaccttcactgcagcaggttcagttgtgacacatatgatgttttataaagtccatatttctgtccagtatgggaaattttcagatcaaacctcaatcagaaagttattgaactagccaagaagaggaagataatgtggagacagaattgcagtcccacataggatggggctgtgggccagggcacacaagtgcaggttacagggaagcacaaagccatagggccaaggaaacagagagaagcagttcaagagaggagtgcatgaggagttctgggcatcttctaaagtgtatggaagagagataatcttctgagagtcacttttggcagagcccatgcagattttttaaaaaaccttttagaatcttgagaacatttcaaatgtgcagaaaaattgcaaatatatccaaagaactccccaaaacatattctttatgcagactcaccaagtgttaacattttgccacatttactttgccatgctgtccctctcccttcctctctctctataatttttttcctgaacatttaagagcaagttgcagacacaatgacattttactcctgcatactgtgtggattttctgagaacaaggtcattcttttatataacctcggtacaaatgttaaagctaggaaatttagcaaaatttttattgaatccagaagtaggtaaaatttttttctgcaaagggccagggagtaaatattttcagtttatgggccaggggtgttcaatcttttggtttccttgggccacactggaggaagaagaattgtcttggggcacacataaaatatactgacaccaatgatgttgatgagaagaaaaaaccctcaaaaaaaatctcataatgttttaagaaaatttacaaatttgtgttgggccgcattcaaagcctccttgggctgcatgcagcctgcaggccgtgggttggcaagcttgttataggctatacagtctctgtcacaactattcatccatgccttggcatacaaaaaacagccatagacaatacacaaatgattgtacatggctgtgttccaataaaactttatttgaaaaaatgagtggcaggccaaattgggctacaggaccatagtttgctgactgatgatcaaacctgtgtctttcatgattgacattcttttttttttttttttttctgagacagggtctcagtctgtcatctaggctggagtgcagccatggctcactacaacctcgaccgcctgagctcaagtgattctcccacctcagcctcctgagtagctgggaccataagcatgcgcaatcacacccagctaattttttgttttgttttggttttttgagatggagtctcactctgttgccaagctggagtgcagtggtgagatcttggctcactgcaacctccacctcccggcaagcgattctcctgtctcagcctccacagtagctgggattactggcacagaccatcatgccctgctattttttttttttttttttttggtatttttagtagagatggggttttgccacactggccaggccagtctcaaactcctgacctcaggtgatgcccctgcctccgcctctcaaagtgctgggattacaggtgtgagccatcacgcccagcccacacccatctaatttttttatttgaagagatgaggtctcactatgttttttgtttgtttgtttgtttgttttttacacagagtctcgctctgtcgcccaggctggatggagtgcagtggaacgatcttggctcactgcaagctccatctcctgggttcacgccattctcccgcctcagcctcctgagtagctgggactacaggcgctcgccaccatgcctggctaattttttgtctttttagtagagacggggtttcaccgcgttagccaggatgcggtctcgatctcctgaacttgtgatcctcccgcctcggcctctcaaagtgctgggattacaggcgtgagccaccacacccggccgaggtctcaatatgttacccaggcaggtcttgaactcctgagctcaagggatgctcctgtcttggcctcccaaagtgctgggatcacagatgtgagccactgtgcctggctaataattgacattcttgaagagtacaggccagttattttgtaaaatgtccttcaatatggttttccctggtgtttctttgcaataagatttaggttatataattttagcaggaatataacacaagtgatgtgcttttcttagtacatcatagcagggccacgtgatgatggttggtcctcctattggggctgaagcatatgtttttaaaatgagggatttgagtaatttcaaacagaataagaaatggttctgcagatggtagcaagagccgtggcacatagaagggatatctgaaggggaggacctgggcaaggagaaggggggcatccaagccttgctagagcacaaaagtggagcaataacaatagttattagtaataatgagatattatgtattgaacactaatgtgccagacaccatgaaaagtatttaaaaatatgtcatctcctttaatcctctcataatggtatgaagcatgatctattattattccatttcacaaatggaataataaaggtgtaggggaggtgggaaagggcaacagtagccccagttcttctctcctccctatatctgttgccgttgccatgtaactttgctgttctttccacaaaagggtcagggtattgtagaggaggaaaagtatcttttcctcacctattgctaggttcatggctaaggcctctgtaacaaaagatggtttaacaaaagaaaagcttacaaatttatttaagataagttttacatgacacaggagctttctaaggaaaggaacactcaaagaaacagttaaacttgtgtatttttatgctaagtttgactaataatggacaatcatgaagacaaataattggacaaaagggttatggtgtaatggtaataaactgggagaacttagcaaggcctctttggtcagattcttctctgataccctgtgtcttcagagataaagatgtttctttcctccaggtatagggagaacatcttgcgaatgggggtcttatatgacccatttcagggtaaggtcagaaaatcgttcttaggttttgtgacctgcttcaagggagaagagcgagaggaaggtgagagtgactttccttctcctgctgtttcctcagatgccaaggtgccatattttgggatagtgtgtcctgaactctgtcactgtattttcttaccccttggtactgagttttgctgtgtgacttcttttgaccaaaggaatgaggcaaaagtgaccatgtgccagtttggagcttaggtcttagagactttgcatgttgctgcttgctctcttgtgcctctgtcattgccaagagaagaacatgatgtgggctccctctggtcctgagaagaggatgagagctgtgcagagcagagctttagtatccaagcccagcctatgtcaaccaaacctcagttgacttgcaaacttgtaagaaatataaaatgattgttaatttaagtcactgtgtttggggatgatttgttatgcagcactggctaactgatataaaggacttaattaacttgcccatggccacacaactacagtagtccccacttgtccagggttttgctttctgcagtttcagtcagaaaataggtgagtacaattcaataagatattttgagagagagagagaccacatccatacaacttttattacagtatattgttattattgttctattttattattagttattatttatctattactgtgcctaatttataaattaaagtttatcatatgtacttatgtatatataggaaaaaacatagtatctatatatggggttcagtactctttgaggtttcaggcatccaccaagggtcttgaaacatatctcctgcagataaggggagactactataccagttatgcagccagattttgaagacaaatgaatattccataaactgtcattttaaccatcatgctctagttacacattgctgtataatttacgcttatgtggatctttccccaaaatccttttgttgactttataaagtccatgtgttcttagagaatcaggggttcttaaaatgttggggatcatttagagaatctgagcctgcttccttctccccatcaaaagatcaggcaaacaaacatacaagactgcacgcaattttgggtggttcatgggttcccccaagctttttcatgaatcacccggaaatgtatgaactacaggtaaagaatcctggctctacatctgaatctgatccaggtagaccctccctaatggctacaatcaagattttttattataaaaaacaggtggacagattcacttgctagattcttccctttcatttgtgtagcattttctatatttgatgccaagctactttgtttatcctcatacctcccatttccaaagccctttggctacactttaaaaaccaaaaatatcttcgtggtaatctagaaacaagtgggttttgtcagagttgctctcctgccccattttctttgcctttgccatgatttgttcgtgtttccggcttaaaccagaccatatttagaataccccagtcagcccctcattcttcctttctggtagggcttggtattggtttctctctcaggcccagtatccatgtgtccaaatgctatgagctagaaagatagcaatagctgacattgctgaaagctcactatgtgctaagcatggagaaaagtgccttttacccatcatctcactaaatccttataacaacccagggaggatgtttacattattatcatttttatagctggggaagctgcggctaagagctaagtaaacgagtaaagagtggtgccgggacctgaacccagattccataacccgtattgttacctactggccttctttagcactaagcctccggacttctctattgttttttgggtcatcttttacgctaattgaaggcagagtctatgtcctgtaatgatctcctaactccgtttactccataaatgatagctctcctcacccccatgggcttatagtcccaggaatgaatttttgtttggctttcctgtccaattttgttcttatcacttcagttcacggaattgggccctttctctgagccccagtatgacaggctggccctgaagagatttcgtggttgataattggatactgtgtgacccccaaattaccctgaccctcaatccactactaatgaatccctgtggaagccaccatgttgatggttgtctactgttcatgagatgcccatgccttttctctatgggttgcaatggccaggaaagttttcctggggagattgaacctgggctggtctttgataatctgaaaggcatggggaaagaaatcattcatgagtacaaggatgaactccaaagaggctgtttctaggaacataaacaagtaaggattcagtcatacagtgatattttgtgtccaccgttttggtgaaattagtccttcttcaagcagctggatttgtataatgcagcccccccccaaccgagcccaccccaaaaaagaggcttaatttgttagacacatgcaggcaatatacaactgtcttttaggtaaacctcataaaaagagctgataaagaaacacatcatccctttattagaaggagaggagaagttggtaactaagaggtcaccaaaaaaaggccaaggcttctaaggttttgtttcattgtgttttaatctctctctggtcaaataaggacaagtgttatctaaatgcctaaggagcagcaagtgagatggaaagaccagaagtcaggtagcactccggaaatcagtggtccattcacagggaaaaactgaaagtgctcccaccctgggacctgaggatttgtagtttcaaaagtggccaaaggaggaaaagaagaaccctattggtcatactgggaggactgggacactgatgaacttgccaaagtcttcagggacaacaaacggtaaccctcatcatccaggtcattgctgccaagtcaggaagcttggtcagtcacctcagacaatgtgggctgggtccctaagaccaatacaagaacataggagcaaccaaatcctcagtgtgtgggaatgtgggcccagggtggattacaggtgagctgggaggttgtcagtcaatctgttataactttaagttccctgagtttgccaaaggccttagggtaggagtggaattcaagacaagtagctggatgcaagtttaaatatgcagagatgaccctagtctcctccatcccctacgtcttagtgtatcctacacttgatggggtgatggtatttctttggagagagtaaaagtgaaagtggggtgggatggtatttgttgtctctttcctttccatctctaccaagtaacactagctttctgttggagggaggaagctgatttttatcctgactcttttctcttaggttgaaagttttaaaatttgtctaacttccgagaaaaatccctcaatctgttctttctttctttctttttttttttattttttatttttttatttttttttttgagacggagtctcgctgtcgcccaggttggagtgcagtggcgcgatctcggctcactgcaggctccgccccctggggttcacgccattctcctgcctcagcctcccgagtagctgggactacaggcgcccgccacctcgcccggctaatttttttttttgtatttttagtagagacggggtttcaccgtgttagccaggatggtctcgatctcctgacctcgtgatccgcccgcctcggcctcccaaagtgctgggattacaggcgtgagccaccgcgcccggcctctttcttttttttaatggttcaatctgttcttaaggtccagaacttccactgttttcccatcagtctttgtttgagagctaagaatagcaaggaggttcctaaagcaaagttaggaatagcagaactaattccttgactctggagagcttgtgggccataagatgcaaatgaatgttaaattgatcattgatatgctagaaaacttcaacccaaggcatctcttgatagttttctttgacctcctatgtccttcaggcccactgcagaattaaatactaccccgtcttttaacccattgcactgtgtgtgtgttaatagaatttatcacattgtattgcaatcagtttatgacctacttgagaagacagactggaccttccttaatttttttgtgcctggaaccaagtagatgttcagtaattaattgttggttgacttgaagtacattttcatgtacctgctagaatcaaaattctttagaaataaaatatgtaaaacataaactttgatagagatgctcttttcatttatctttttctcaagctttcctttaagtcacttcatcttgcttttcaacagaccatcttattttcccctgggagtctggacaaacctcctctctacttcctgtcaaagatgaattccctcttaggcattcttagaagtatagcacagtcatttaaaagttattttaaaaatggagtaacctccactaacatatctgacatatctgctaatattagaagacttggattctataaaagttttttttcctaaaaagcatcgcattgatcagtatcatgtatttatatgatactgatcaatgaggtgctttttagaaagcaggattcaattaattgaagcagctctttacagagatggtttttccctcatcaatggattttctctagtacttttttcacagggatgttatgaggtgataagaataagctttgaccttagagttaatctggagtctagagtcctctgtgtttttataaaaatacatcagagttgcagaattaatcaccattgtgccttgtccagggccccaggggtcagtatataaggaagttgtgtccattcttcaagaacagagacatctcatctagggattaagagtatgtgacagattaaggaagtttatccctttaagcatgaaatcttttccattattttaacaatcttagatggaaatctctttcaaatgcattacatgcttacccatcttccttttttgtcttttctctgcttatttcctaagtcctcagtgcttcacatagtttactcttttcctaggggctcagggcaacattgcagctgaggctggccattctacaaggaagtcccaaggttcttcattctagaaaacccatctgggattgttcacctttcctacctctcccccatttcccaaaatggaaataatattttttttttttgctggtcataggaataatagatattgttgaaatttaaatacaatatagggctatataaagtatagataacaattgggaatgtatcgtttaggaatttttaaatgcataaaaacacacactacttgttagctctatgacctcggacaaggtgaggaaccttccttttcttgctcttgttttctagtctataaactagggatcacagcaaccttacgggattgttgtgagggtcaactgagcagttggtagagtagctggcatataacaagggttcaataaatgtttattctttcccctaaccttccccttggtaaattattttaagagatagtatagtttaaaatattagttccatgggctcttcctccagtgctgtcagtgaacatttattgagatgtgaccatgtgtagtaatgacaacatgattgaatatgttctgtgtgccaagttatctattttaactctcaaaactcttatgaggcaacaactattgactgccccatttcacagatgaagaaactgaggcttggtgagaccaagtaacttgccaagattacaacactagagccagtggtgggtagagccaggaattacatggaggaagcctgacgccagacactgtgtgctcaatagccacattattttgcctcgcattagaccaatataatataagagagaaggatgtcaagctgaggagataaagtatggagatatgcataggtcactaattcccaaacacaggtatctattctctcttgggcttatcttgccccatggcgtaaaggaggcttcacatggctgactccctctgctccatgttggacctgacagtctcctggccttggatgctccactcttactgcaactgacccacactaactgagctctcctctaccaatgccttctccatgcccccttcagctagtggctccactactcctctcaggcctggaatctctgcttcatgcttccctttcttggcttctcttctcctctgtcatcccattgttctttctttcctttgaaaggcctcctagttctgtggttactcttcatttctcatcagttctctaggccaagccttcatgacttcatgcctagataatgacaagagcttcactcctactttttgaaaaacccagtttctctagatgcatagaaactcaaatatttggaactagaagacttttaggagaccaaccacctagatttccaaaaaatgtgtctccagaatctgcctttctcatttaagactcaactcaagaggtacttccttcatgccactgactctgactccttagggaatctgtgctttgggtaacattcgttctgcttgctcagctgggtgtagggaccaggtgctctcgattcccaccccccacccccacagcacccagcacagggccgtgtacacaaaatttgttcaatagataactattaattgatgagtcagtgaagcaaacaattgtataaattaagagggtaccatagggactgcagcaattaggaaagacttcatgaaaaatcaagatgtgtggtgggcttctgaggatgagcattctgattaattttatttattttgaccagaaacaaaaattagatctgcaaaagggtttttgcattgcttttaggtggtctgggagatctggggagacgtggccttctcacaattgctgactcccagttgtgtatctacagaaggagtcttccacttgaactccagatttgtctgtccagctgcatgcttgacagttccatgtcacagacatcccaaattcctcatgtcctggaccatcactgcctttcccctttccacctgctccacctgtggtctttctcatcttagctaatggtacctctatattcctgcttgcccagggcctgaatcccagagtcatccttgactggccttatgcacttgacatccaaatcaacaaaaaatcctatcagttctaccttcaaaatatgtccagaatctgacttcttaccccttttatggctctgctcccttctaacttgcctccctactttccttctcaccaacgctattttctttttttaattatactttaagttctgaagtacatgtgcagaacgtgcagatttattacatagttatacgcgtgccatggtggtttgctgcacccatcaacccctcacctacattagatatggtaggtgtttctctgaatgctatccctcccctagccccccacacccccgacaggccccagtgtgtgatggtcccctccctgtgtccatgtgttctcactgttcaactcccacttatgagtgagaatatgtggtgtttggttttctgttcttgtgttagtttgctgagaatgatggtttccagcttcatccatgtccctgcaaaggacatgaactcatccttttttatggctgcatagtattccatggtgtatatgtgccacgttttctttatccagcctatcattgatgggcatttgggttggttccaagtccttgatacaccaaccctattgtcaacacagcagccgaagtgaatcttggtaaaacataagccagatcatgttactgcctgactcaagaccctgcaatggctccctgtttctatcagagaaaaaccaaaacccttacaaaggctgcacaatctggggtccccagaacctcactgacctcatttcttaccactcttctttggcttattctcctccagccacactgggcatcttcttactttgcaaggctgcttgggctttggaactttctgctccctctgcccgaacccttccttgcccatgtatctgctaggctgattctcacatccttcaagtctttgcttacatgtagggcaatcatatgtccctgtttgcccaggacagtccaagttctcacctgctgtcccagcataattatgaatagcttccctttgtcctgttaaatgtttttcagtttggatgataaattatatgttcactctactcaaatgtcatattttcaatgactcctacccacttcacttaaagtttaccctccaaaccaaccattgacattcccaattatccttaccctatgctattttttccattgcaatgatcaccccgtaacctgttatataatttgattatctggtgaatttatcaattattgttcatctccgtcactagaatgtatactccaccaagggaggaatttttgtctattttgttcactgataatatccctgtcacctttctagtgcatggcaggagttcaaaaggtgtttgattaatgcaatcattttggaagacaaagaagtgtaattccttagatcttcaaatagtttatcaggaaagcaaggctgaatatgtgagtgatatcagactgacacaaaatccaggatgtgtgcttgctgtatcgacctgcttgagaaggatttggaagtcatttattaaaatcagctttctatctcgatgtgctgtgttaggagcctcttcagagcagaacatgggggtgaagaagacaattataccgggaatccaagacaactgaagtaaaacttcattctgaacttcccagagctcaggcaaaagggaaaaaatcaggttgcatagcttctgtctcctctccttgttgcctgattaaaaaagaaaggcatttattcaaagaagacatacagctccaagttttatgtttcaagagggaatcatcacgttggctctttttaattggtggtatggattgcgcatgttgattttttaaagtgggagtaaccacacaccttagtgtgcccaggatagtcacagtttatacctgctgtcccaaggaaattgttaatattcaacatgtcttggtttggatgatatattatgaggtcacactgtaagggacattgaaggacataagagataattacttttgcctttacagagggaatgcagacagtttcctcatatgacctttggaaagcccaaggctatgaggataagctatgttcccttgagaatcaagacactctttgagcagcacacagtttcatatttgctcaggatcaactcaaatttggggaagttccaccatcaagaagctcctgaagctcaagctggctcttgatatttgctgccaagacccttgtttaccaaacacttcaattacagggtcccccttctaggttcatttgctcattgtgggcctttgcaagatgctggtgaggtcagagttttcactggacgtgtttggggtgctggagaagtttcctcatagatttatgagtctctttaatgtgggctgaactgtaccttcccatccaccaataagatttttttttagacaataatacaatttagacccccatatgctatatttacaaactatagatttctgatgaaaaatcaattccttcattctaccatgttcagttggatagtacctaaaaacaacaaaaagtcacctgggtaaactcaagtgattttctaagactctagtctaacaattgtcttggtttacaacaccttatgcattttgacctgggaggggaaagacctggttctttgtcttggccctgctgttccttcacctctctgagcctttatctcctcataagaaggagaggatatggactctatttctatagtaccttgtagtttgattgctatatttctcctgtagagctgttcattcagaacatctcagcactggtgacaggaatcttcagaacacctggtcttctgggctgtagacatcagaaactcttcagagctcaacctgcaggccagcctcaggcctatgagaaggcagagagagttggactacatccttggtcccttctcctcaccttattacttctctttttcatagttcaggaggtgtcttagtccctttgggcagctataaaaaactaccacagactgggtatcttattaacaatggaaagttatttctcaccattctggaggctggaaagtccaatatcaaggcatcagcagattcagtgtctggcaagggcctgcttcctggttcatagaaagtcttcttctcactgagtcctcacatggcagaaggggcaagggagctctccagcgtctctcatggaagaacactaatcccattcatgagggctccatcctcatgacctaatcacctcctaaagaccctacctccaaaaaccatcccactggggattgggtttcaacatacgaattttggagggacacaaatatttggcctatagcaggagggtccttcaacagtgacaaggtatgtcagaactagggtcttgggtagccccaaaccgcaagagttcttgtcttcacttctctttccccatccattagtaagaatggatatagtatatccatcacaaaaatgaattacctatttggagcactaaccatgtgccatgcatggtgctgagtattttgccacatttaattgtcacaatgacccctgaggcagaatgatagttattcccattttgtaagtgaggtcctgagtctccgggagatgacttgccaaaggccacgtagttaagatgtagcaacctagcattctaacccagacctgtgtgtctctgaagtgtacatgtgtaaagcaatgtaagctgctgaattacatctgctgtcttcaaaatggcagccattaatctgatccattaagcatgggccaataggagaaaccattactctgccattgcctctaatctaacatgaccagtgaggtaatttcaggttagcttgaagtggggagaaagaggagatgtccttcagagctgtactgctcagagggctctaaggtcacaccaactgaagccagaggcactaggcctgtgaggaagaaggatccaactccttcgtcccttagagtgggccagggctgaactgtgaaggcgggtctgacaccctctcttctcacgtcagcttccaggttacctccaatttgaaagccactgaagtggatgcaaaaggcaacagagcctgaggccttggcatctctgcccatcctgcaaaggtcagcacagtcttatctagaacacagctgaggaggcaatttccttgaatactcggggctgggagacactttctccctcttcccccttttgtgtttctcctgcatttccacaaggctccaggaccctgtgctggtgaagtctttgaagaaagagggggacacggcttgggggaaccagcaggggaagagggcaggaggagggagggctatgtctggtctggtctggtctggtctccctttccactcccacatcacacgccttcacctggaagcttcctaacctgaagtacaaatgagaccccctgggatcccaaaatagctcccctcacagctgcacagcatccatttatagctgtgcctccctacagccccaggctgcctctgagacgcacttctgaggtcagcgcctgtgaacaccaggctcaatgtcgttggagaacagaagtgctcataaggaacctattatggtcttgtgactgtttttcaggactcgccccaaccctcagagactttaaagggccaaatttgttttgacctacagccagaccactttttgtccaacaataacccagaagcgggtcagattccatcccctgtgcccagcagcaggtgaggacgttgcacttggtggcagcaggacaaacagtactgaagttatgcctgggcctcaggccaagtagctcggacacctccagggaagatcgaccatcgggctttatgtatgtacgtgttcttttattagcaataaaacttgggctattaattgactttcttcactcatgttattcatattgattctgaatgccaaattataaagcaaagagaaagagccctaaccccaccaagctgtgttccgtacttcctcttcatactccatctaaaacaaattagctttgacccactatctctcacatggcttatttagagacggcccaaaatagtccatgaactaagtatactttgctttttcactgtcaatcctaagtagagccacgagggcaggagtgaccctggctggcctctcgagttgtagtgagcctcctactttctgcaacagccatcagcacttgtcttcatgaaatattttttgttgaagtgaactcaggcctcatctggagcttgtcctgggcaattctctgaagtcagggtctttctttctaaagttgctgagcaagagcaagtcttggtggacctaccatatcagagtggaggcctgacatgagctaacaaaaacttaggccattgattacacacagttgcaagctaaggcatcagaggccctccaacagggggccaagaacttatgtcctgcggccacacagcttgcatttctgctacatttccattaaatgctaggtgtgtggctctcaaataagctacttctattcctgcatgcctgtgctcctgtctgtggaggaggtatggtgacagtttgttgacatgagatcttcccgtatggcatatgatacatataaatcacttggattaaccatcattactattttgaaagggaaacaaaccatatcacatatgatctttgttgtatcttatttttgagccaatgctttaaaaaaaaataaacatatgctaccagttttcgtaaggtaaacgataatacggccttctctccttcttattatactgagtctcattcatctctcagaatccttttcattatcattgtcactaaaagcattcggggttggatcagtgaatattgcctaaaaaaaaaaaagaagaagaaaaatcaaaagccaactaattcagatacatataaaacaaaactttctttttctgtaagcaaacttaaacatttttttggtactttgagctctcacccttggtaaacagaagaatcatagtcatagccaatctagggcctttcctttcaaagcaggaattgggcttttattctggggtggggagtggaggaggggaaatcggtttggaaattgggacctctggtcttcagccaccatcctgcagcctctcttgcatccactctgaagtttctgtttcctctgggatttgaatgtttgtccatgggggtcacttttgcacttcaaggctctcctggtttggctttttctcggtgtctttcatgccacacaggcagcaggagccttggggagctgtttgaggaggttctgtattatctctgtgccaatcttgggctttcctccaaccccacgacattctgcgacctgtgggaattctacaagaaggcagtctcggacctgcttgtctagacatgacctgcagctaccccagccgctaccatacctgcacatgatttggtgcaaggaaacactgaagcatggaattttcctgggctctactcaggaacaggcacagtccctcccttgtcacatgccttaacgttggatcaaggcacagtgcacttctttgggtaccggttggcatctactctcactatttcttcttctgttattctttctcccctagcttatgacatctttcacctagggacaagaaaaactgatcatgggtatttcttgttttcttcgaaatagactttaatttttggaaaagttttaggtttatagccaaattgaacagaaagtacagggatgttccatatctcccctgccctcacacatgcatagcctctgccactatcaacgtcctgcaccagagtgctacgtttgttacaactgatgaccctgcactgatgtgtcattatcacccaaagtctacagatcacattatggttcaccctcggtattgtacattctatgggttttgacaaatgcataattacatgcatccatcattatagtatcatacggaatagttttactggcctaagaatcctctgtgctctgcctactcattcttcctccttgccaacccttgattctttcactatttccatagttttgccttttccagaatgtcatataattggaatcatacaggacgtggctgtttcagatttgcttcttttacttagtaatatgcatttaagttttctccatgtcttttcatggcttgatagctcatttcttgttagtgctgaataatattccattgtctggatgtaccagtttatttatccattcacccactgaaggacatcttgattgctttcaagtgctgagaatttatgaataaaacttctataattttctgtgcatggtggctcacgcctgtaatcccagcaatttgggaggccaaggtgagcatatcacctgaggtcaggagttcgaggccagcctggccaacatggtgaaaccctgtctctactaaaaatacaaaacttagccaggggtggtggtgtgcacctatggtcccagctactcgggaggctgaggcaggagaatcacttgaacccgggaggcggaggttgcagtgagctgagatcgtgccattgcactccagcctgggcaatagagcaagactctgtctcaaaaaacaaaccaacaaacttctataatcatccatgtgcagacttttgtcttcaacttttgggggtaagtagcaaggagcaagtatcttagttcatttcatgttgctataaccgattaccacaggctgggtaatttataataagtagacatttctttgggtcatggttctggaggctgggaagtccaaggccatctactgggcgtcagatgaaggctttctagctgcatcaccccatggtggaaggcaagagggcaagggagagacagaaagagaagggagagggggaaggttgctgaacttaaccttttatcaggaaactactcccatgataacagcattaatgccttcatgatggtcaccttctctctttgtcctcacatggccttcctcccttcccctctgtctctctctgtctttctctctccttccttcattccttccaccactgcaaaccatcacccctggctaatttttgcattttcagtagagacagggcttcaccatgttggccaggcaggtctcaaattcctgacctcaggtgattttttctctttctttcttccttcttttcttttcttttctttctttctttcttttcctttcatctcattctgctgcccaggctggagagtggtggtgcaaacacactcgctgcatctcaacctcaagctatcctcccacctcagcccctggagtagctggaactatagggatgcaccaccacacctggctatttatttatttattgggcatgtgtgcgtgtgtgtgtgtgtgtgtgtgtgtgtgtgtgtgtgtgtgtgtgtgtagagatggggtctcatgttgctcaggctggtcttgaaaccctgggctaaaacgatccaaccacctcagcttcccaaagtgctgggattacaggtgtgagccaccatgcctggcccacctggcctttcttagatgaatgtgcatggagagagatagagaatgggatgggcaggggattgctttctcttcttaggaaaccagcaatctggccaggcacagtggttcacgcctataatttcagcactttgggaagctgaggcaggtggatcacctgaggtcaggagttggagacgaacctggccaacatggtgaaaccccatctctactaaaaatacaaaaattagccaggcgtggtggcatgcacctgtggtcccagctactcgggaggctgaggcaggagaaccacttgaacccaggaggtggagactgcagtaaaaaagaagaccagcaatcctctcagattaggaccccatctttatgatctcacttaaccttaattacctcctaaaaatcctgtctcctaatacagtcacattggggcttaaggcttcaacatatgaatattggggacacagaattcagtttgtagtaaatgtcttttaagtgtctttcaatctatagatcttcccactctttctcatttgtcccctccttcattaattttgctggtagagtttcccacagtttggattttgctgtttgcagctctgtggtgttgttttaacatattcctctatgctgtatgtaaatggatagtcagatgaagaggaaaggttagattggcagaactatttcctaggcagagcggtaggtttctatcaggaggcactattccctaggagtctctgtttctgtgaagttagcagccattggtgattattgccaaatccattattctattagaggttacaaaatggtgattttataattttattattccttatttattaaccaaaataattcaataaaatgaaactcctccttatcaactatttggttatgctgagatctagtgcaaatagaaaagacagacttcagagaatactataaacacctctatgcaaataaactagaaaatctagaagaaattgataaattcctcgacacatacaccctcccaagactaaaccaggaagaagttgaatctctgaatagacaaataacaggctctgaaattaaggcaataattattagcttaccaaccaaacaaagtccaggaccagatggattcacagccgaattctaccagaagtacaaggaggagctgctaccattccttctgaaactattccaatcaatagaaaaagagggaatcctccctaactcattttatgaggccagcatcattctgataccaaagcctggcagagacacaacaaaaaaagagaattttagaccaatatccccgatgaacatcgatgcaaaaatcctcaataaaatactggcaaaccgaatccagcagcacatcaaaaagcttatccaccatgatcaagtgggcttcatccctgggatacaaggctggttcgacatacacaaatcaatcaagtaatccagcatataaacagaaccaatggcaaaaaccacatgattatctcaatagatgcagaaaaggcctttgacaaaattcaacagcccttcatgctaaaaactctcaatatattaggtattgatgggacgtatctcaaaataataactgtctatgacaaacccacaaccaatatcatactgaatgggcaaaaactggaagcattccctttgaaaactggcacaagacagggatgccctctctcaccactcctattcaacatagtgttggaagttctggccagggaaatcaggcaggagaaggaaataaagggcattcgattaagaaaagaggaagtccaattgtccctgtttgcagatgacatgattgtatatctagaaaaccccatcgtctcagcccaaaatctccttaagctgatagacaacttcagcaaagtctcaggatacaaaatcaatgtgcaaaaatcacaagcattcttacacaccattaacagacaaacagagagccaagtcatgagtgaactcccattcacaattgctttaaagagaataaaatacctaggaatccaacttacaagggatgtgaaggacctcttcaaggagagctacaaaccgctgttcagtgaaataaaaggggatacaaacaaacggaagaatattccatgctcatgggtaggaagaatcaatatcatgaaaatggccatactgcccaaggtaatttatagattcaatgccatccccatcaagctaccaatgactttcttcacagaattggaaaaaactactttaaagttcatgtgggactaaaaaagagcccacatcgccaagtcaatcctaagccaaaagaacaaagctggaggcatcacactacctgacttcaaactatgctacaaggctacagtaaccaaaacagcatggtactggtaccaaaacagagatatagaccaatggaacagaacagagccctcagaaataataccatacatctacaaccatctgatctttgacaaacctgagaaaaacaagcaatggggaaaggattccctatttaataaatggtgctgggaaaactggctagccatatgtagaaagctgaaactggatcccttccttacatcttacacaaaaattaattcaagatggattaaagacttaaatgttagacctaaaaccataaaaaccctagaagaaaacctaggcaataccattcaggacataggcatgggcaaggacttcatgtctaaaacaccaaaagcaatggcaacaaaagccaaaattgacaaatgggatctaattaaactaaagaacttctgcacagcaaaagaaactaccatcagagtgaacagataacctacagaacgggagaaaatttttgcaatctactcatctgacaaagggctaatatccagaatctacaatgaactcaaacaaatttacaagaaaaaaacaaacaaccccatcaaaaagtgggtgaaggagatgaacagacacttctcaaaagaagacatttatgcagccaaaagacacatgaaaaaatgctcatcatcactggtcatcagagaaatgcaaatcaaaaccacaatgagataccatctcacaccagttagaatggcgatcattaaaaagtcaggaaacaacaggtgctggagaggatgtggagaaataggaacacttttacactgttggtgggactgtaaactacttcaaccattgtggaaccagtgtggcgattcctcaaggatctagaactagaaataccatttgacccagccatcccattactgggtatatacccaaaggattataaaacatgccgctataaagacacatgcacatgtatgtttattgtggcactattcacaatagcaaagacttggaactaaccgaaatgtccaacaatgatagactggattaagaaaatgtggcacatatacatcatggaatactatgcagccataaaaaatgatgagttcatgtcctttgtagggacatggatgaagctggaaaccatcattctcagcaaactatcgcaaggacaaaaaaccaaacactgcatgttctcacttataggtgggaattgaacaatgagaacacatggacacaggaaggggaacatcacacaccggggcctgttgtggggtggggggaggggggagggatagcattaggagatatacctaatgttaaatgacgagttaatgggtgcagcacaccaaaatggcacatgtatacatatgtaacaaacctgcgcgttgtgcacatgtaccctaaaacttaaagtataatagaaaaaaaatagaaaaggtagaagagaccacgcatgatggctcacacttgttctcccagcactttgggaggccaaggcagctggatcacctgagcccaggagtttgagactagcctgaggaacatggtgaaatcctatctctacaaaaagtttaaaaattaactgagcatagtggctcatgactgtagttacagctactttggaggctgaagtggatagatcacttaagcctgggcagttgaggctgcagtgagccatgattttgcctgtgccacagcactccagcttgggtgagagacctgtttcaaaaaggaaaggaaaggaaaggaaaggaaaggaaaggaaaggaaaggaaaggaaaggaaaggaaaggaaaggaaaggaaaggaaaggaaaggaaaggaaaggaaaggaaaggaaaggaaaggaaaggaaaggaacaatatttgattgcttgattcttaccttttaaaaataatctagtttccaaataattattacctagcatcctccaaagttaacttttaaaaaaggataactgaaaactcatgaatttaaacacatttgaagtgtcaacatccattaaggttatttttatggaacctcatattgtcctatctttggccaatgagatcttcttttaagttggcccctgagtcttcttgacatgaccccagtaacctgtgatactgtagttgctctttggtttgatgaaatatttccaagcccttttataatatgtttcctgtctttgccctggaatcagccatttctctaaggattcctggttcttttcatttggaaatagtgattcaaaaccacagctttggcactacgggagggcattggattggttattatctccagatctttttggtggaaaatgtagggataaagagaaatacaacataaattgatattgataaacatcatttcaaatttgagactaagggtttctatttaactgcatctatcttgcttctctttcttctttgtacgccagattctggttcccaaggacacaaacttactcatttcttttaatctataatacatattagaacacccgtgttagactaccaactccaccatcaatgatataatgacagaaaattgtttagggtttttttttcccttcagttctttttgcttttgggtgatatcccatgagggatgttttaagaccctaaatcagatttttgctaattaaaagctctggcttttgaaacaccaaagccaagaattagactcttgttctcctgtctggaggagccctaccttagaaaatgcagtggatgctgggggaggagataacagtgaacatgtatggaatcagtgtgtgaattctaagtgatggaggttgtgggcaaaattacctctcaatttttcacttagaaatctctgaacatctagtttatcacttggtcaatactagacgtttgatacatatgtaaattaattagacttacccactaatggctctagcctggacatataaactgagagcaatttctgcagatagcgatgccagagtagatgtttctctggatcctagctgccttgggtttccaggtagaatatttcctgttgggagctgtggtgcctggtgctcagaacttggtgaggcccttaggaagctcaagtcaccacaaggtaaagtgcatccctcttgagtcacctgcttttgactttttatataacccgattcaaagttttcacctttgttaagggtaggacttaacagtttattaatcagtaattatttcatagtaactgtgttagcacaaacataatagttataccaacataaatgtattacgtatataaatatatgttacttatcattttctcttaagtcactaagcatgagttgcatcatctaaagagttattcagggcatgggtgagttctgactggttccacaagtgcaagatctgattggtcaaaagtttgccagagacatccctacacaagtctttttatgtgggtgttttaaattttacagagtgcataatagcttttatttgttctaagcaaatatctgacaaggtcccaatccattgattttgcagatgaaatgtttcaaaatgcaattgccttttcctaaaagccagcttgaaacccacacatgtttatattgcatgttgtgttcaaagtgcacctgaatgagtggagtgggttctgcctgatcttgttgggtaggaaagatgttccacggtacttgaacatgggagaccctagatggcacttcagttttccctcctgcaggtagcatcagcactaggcactgtagtgggggagaaatggtctgagatgcacagggcctgggtaccagttttggctgtcctactgaagagccacatccccttgggaaagtgtctaatcatttgtttctcacttccttaacttttattttaggtttgggggtacatgtgaagatttgttacaaagtaggactcgtgtcatgggggtttgttgtacagattatttcatcaccaaggtattaagcccttcacccaatagttatcttttctgctcctctccctcctcccaccctccaccctcaagggtatcccagtgtctgttgttcccttctttgtgtccatgagttctcatcctttagttcccacttataagcgagaacatatggtatttggttttctgttcctttgttagtttgctaaggataatagcctccagctacttccatgttcctgcaaaagacatgatctccttctttttttatggctgcatagtattctatggtgtatatgtatacattttctttatctaatttgtcattgatggacattcatgttgatcccatatctttactactgtgagtagtgcagcagtgaacatttgcatgaatgtgtctttatggtagaatgatttacattcccttgggtatatacccagtaatgggattgctgggtcaaatggtcattctgcttttagctctttgaggaattgccatactgctttccacaatggttgaattaatttacagtcctactaacagtgtataagcattccctttcctccacaaccccaccagcatctgttattttttgactttttagtaatagccatctgattgatgtgagatggtatctcattgtggtttggatttgcatttctccaatcatctcacttccttacttctatcagggttgcctgtccactgcatcttaccaggttgtggttagggtcacatgagaccttgtacaagcatgaaagccttggtaagctatagagagtcacatgcatgttttctggtacatgctgcttgttgagtgtcttcatagtaaccagctttatgaacagcagaggaagagaagacatttcccttgaggaacaagcagaatccaccatcctgtagaggcccagaatagcactgccgttttcactttttagtatggtgcatttgcttttcctcagttgtgctgcggtaacgaacagccctgcagctcagtggctcttgaaaaaaggtctattccttgtgttccatcacatttcagcggtgggtgagctgcagctctgctccatgtgtcttccctctgggatccaggttgaagaggctgttgatacacacgtcatgaagctttcctggcagagaaaggagcaaagatagaactacctgttggctcttacaacttctgtttgagtgtgacatatgttactgccactcacatgccattgaccaaaccaagtcacagaggcacgcttgatgtcacctgggtgggaagtacaatcttctcatgaagagggacagcaaatatgcaagaacaatagtagaatctcccatggcaaggaaggtcacttaacatcgtggtcctcagccaccagaaccaaatatcataccagtgagatgcttttaagcttcacctggtagatcatcaagctggttgctttcgccacagctctccctgaagtcattagagaattgaagacttgattgccacactgggtccttgctcagttaggataaggaaataaaccaaaaagactcagagccttggggttgggctctggaagaaatgattaaaagtcctagtggagaggaatgtgcactgactactctcagagcacaaagatgatttttagggaacagaaacaggtaagcaatcagatggggaaataaaggaaagaaaagtgagttagaaatgggattccttggaaaaaaggccactggtttaaagagacagtaggtcaaggaccaccctaattcacatgaggactaattacagaggaaaggaagttgcttggccaccagatttgggagtgatggttctggctggtgtggtcttgccagcatctttggtggtgtttaagagcaacacaggcatggttttgatgacatcagataaccttccatttgaatggatttctttcatttgggaacagcaacatgttcgtgtaaagatatgaatagagataaaggaagaggcacaggcagcaaatgaggtggggcgagttggcggtgagagagcattttacaatttatccagctgtaagcacccaccataatgcctccccaaacctccaaagtcttacttcctcctcgagagatccctctgtcctcaacaagatgaacagaacaatgtcctcatactcttttggttgaacaattctgtgacagagcaggggatttggggctgacgacatttagggagcagaccctggctgccccaacaatacagcccttgggtgtgtttttcttactgagttgtttgaatgttcaggtcaaggggccagagccttttggtacattccctgtgctgcaagttgaagctctggcatgagctcatcatggggttttttggaatcatgggccaagatggaatgtctcagagcaacgagggaccttacaggtcaggagcccagtggataaagctgctggctcaggtttacatgagaaatctgtgttggaactgtgacgggaccaatgtctcctggcttccaggccacagaatcctgtacatgccatgccagctcccattcacaaacttgaaaaattatttccccaaatacaattcagatacttttgataataacagacttgggatagtggctccccctgaaggccttttccagacaccatctcaaatgatggctctcttgacacaaactcttgggcttgactgagcttcctccttcattggtgagagcccagtgctacaggctgttcctctacaagaggattaggagggagctaagtacctgtccatggggccagaggtgtcaaggaggtagtcacctgaggcctgggtgcaaggccaatgtcaaagagctagggcagaatcttgggagaataacagctcaggagacaaggcaaggtcttaccttaatttcttttgctgtcttagagccacccttgtaatcaaagcaaatactccaaggctgggagacgccatagctctgtccttctcacccttctttccggaaatagttgcaatcaagagctggggctttctatttagactagctggcttccaattccagctccactgtttactatctctttacctttgtgcttcttatataaaccccctaagcctcagtactattgtctgtagaatggggtaacagtagtacctacctcataagactgttctgagaattaaataagagaaggcacctacagtatatagagcaatgtctggaaaagtgcccagtgatggtttcctattactattaatattgttattattattattattattattattttgagacagactcttgctctgttgcctaggctagagtgcaatggcgccatctcaggtcactggaacctctgcctcctggggtcaagcgattctcctgcctcagcctcctgagtagctgggattacaggcatgcaccaccaagccccactaatttttgtattttcagtagagatggggtttcgccatgttggccaggctgattttgaactcctgacctcaggtgatccacccgcctcggtctcccaaagtgctgggattacaggcatgagccaccatgcccagcctattatttttaaatgatgctatttttcacatactggatacttagttacaaaaaagtcatatgcatactctgcccttgtggagatctgatctagcaaatgagcattttgccttctcattggtcctccatgctttttggaaattcaggatgctaatgctgggagatcctttagggatcaaaggtcagccctctcattttatggctgaagtcattgaggcacaaggaggaaaagggattcaaccaaggtcttgaactcaagcgttagatgctgtatttctttcattcatctctattattgtcattaattaattttgatattctttctaatatgttttttaacttttagggaacttatatttgtcagctttgcaagtggggctcagtttcggggaaggggtgagagagaagaaaggaagaaactgatgaagagaatgaaagaggaaaagacctgcctgacacctggatcttagaaacaaacctttcctaacaacagacctccaagcataaagagagtattttcaaacaactcaaaaaatcagtctaaatcaacgatattcaaaaggacaaagaaaaaaataataggggattatgttcttttctcatctgtcttatgttctgaagttattcatttgacaccttctgctcttgtacgatggcaggcctgtattcccaaagatgcccattccagccatctattgctgtgtaacaaatgacgacaatgtatgatggtttaaaatcacaactattttatttcatctctcaatattgtgggtcagagttcaggcttggtgaagtgattcatctgctccatatggcttgaacagtggtctcagagtggtattctgctggtgagttggctggtttcaagggtctaagtgaagtttagaggcttcactcacatgtctgcaccttggcagggatggcttcaaagatggggtccactgggactggcgactggagcccacacctggcctctccactcagacttctgacagtaagcaaggcagaatcacatgactttttatgacctagcttcagaagtcacaaagcatcattttggtcataccccattggtcaaaacagtcacaagcctgcctagactgaagaggcaggggatggacgctagcttttaatggagggagtgtcaaagaagtcatacttccatggctccgaagttgggctccaatgtggaatgtgtttacctttttccttctgaatgggccccatgagcagccataactgtgaagacagatacaatggcagggaccatggcgccttcatttcctaaggtccatggtaattttctgcaaaccaatacttctcctcaataaacacattatagaataactccttctaatttgggtccagtcttgttataattgtaatatgcatgacattttgatatgaccattctgacattcacatctcttttatgactctgaaattgaaagtgtttggcttaaaaaaatttttttaccaacaaatgaacactgaactcttttcccatttcctcaatcttacaccatgggaatggaatagattcagacatgttcctatcactttattcaggcaatagtgtagttatttttgataattggctttgtgttaggcactgtgccaactgatttttatacactatcttgtttatgcctcttaataaccctgtgatatgactattatgcccatttcccggatgaagaaacagaggtttggagaatttaagtaactttctcaaagttcatctagttagtaaatgactcacccattcatgcaacaaatacttattaagtgcttactatgtgccaggcactgacctaggagctgagattacagctgcaaacaaagcagacaaaagcgcctgccctcatgaagcttacattcgaggagggagcaacggagacagataataagaaacaaacaacatgcatacgtaacacatcaggtgataaatgctatggagaaaaacaaatgaggaaagatgggtggaggcagtgggggtgcaggcagattgctactttaaatccagtggtcagttggcatagcagcaaaagcgacatctgagcaaacacctgaaggagatgagggagggggctagaaggaaatctgagaagaaggaacagtgttagagttcaggaaaatgatttgaccccccagtctgtgccatggtaaacccatgcttataatcactggactatagtacagtgccatagccactgggttgggtctgagctcagtgctgctcatgtttgaccacacataggatcgtgaaaaggtcttgttaacttgagattcctgggctcaccttcagagattctggtgctctaggtcccctatagggtctgaaagtgtgcatttctaacaagcgctccgaaaatgctgacactgctggttaaagatcattctttgagaagtgctgttaaagaaactcacttagtaaagtagggcacgaagagcaaagaaagtcctatgagtttccagggatgcttatggatactttggctaacagtaatttccatacccacacaactcccccctaaaaaggccaagtgttctctattcaacacacagacacgtaaatgcacacacacactggatcaaatcctcaacaaatcctcaattatcatttaacctaatgttaatttagaagttaggaccctgagtcagaaaatctggcccagcttataccagctgtgcatcctaggcaagtcacttaacctctctatgccaaatatagaggtctttgtttattatgaaatttgggagaaggaggcatttgtaatttgcagttattcaatgaaaagaagtgaactgccatgccctcccgaccccatccctctccagcaaagcattagcccatcctatgaagtggggaagaggccaaggggatgagggagaggaaagggaattgcaggaagtacacacaggatacaaaccatgcgtgtaattttgtgagcaacgatgcaacctgacagttttcagcctcttccctggggccagcaccccatcatgagatgcttttcctttgccacatttccttgtcttctgggtccagaggaaaacggtttttccattctcactatggtgattcactagctgtaccttcccaccacacctcccaagcctagatttatagctcaaagggaagatgtgaaggccggatttgttcataaatggcaggtggtgataggaagactgtgtggtctgagagagggagcattgaaccagaccaagcccattcctgtctgaggtcggcctgagggattgtggccttggcaaggctttcaacaagttcttcttctgtaaaatgggcagaattgccacggcttctacttcctcctggacacagaagtaccaagaacagctagaagctcaggatcctactaatgttgaatatgccaaatacacaaatatccaaatagtgcttatggatagctgggtactgttggcagttacagcctcactcaccttttctgatattaataataattaaggacggttgttcagcacctaccctttgccaggcactgtgcctggccctttgcttccagaatctctccagatccctgtgattgccctgtgggatgagtagagttatcattcctatttttcagataaggacactgaagctcagagacagtaaattactttctcccaaggtcatacagctactaatggccaggttggggtttgaactgggaactctctccatagtttgtgcccatatgctattgcctggtctccatgcactaacttgtttgtttcctacagcaacaaagttggtttcataaatctgtaaattgatgctgtagtcttagagatggctgtagaccggaaaactgacattgccacacaatttggcttagaaacccatccatttgattataacttcttttgctctttcccttatccttgctttttttttttttttggcggtgtcttgctttgttgcccaggctggagtgcagtggtgcaatcatagctcactgcagccttgatttcctgggctcaagtgatcctctcacctcagcctccaaggagctgggcctacaggcatatgccaccatgcccagcttattttttaaaaccttttgtagagctgggtctcactatgttgccctggctggtctcaaattcctgggctcaagcaatcctcctgccttggcccaccaaagtgctaggattacagatataagccatcgtgtctggcccttgcgttttgatttggttttactcttctctcaggaaagatacaatctggcttcccaaattcctgaaatactgactcaacacaaatgccttctgctgttttcccaaggagctatttggttgtgctttaacttgcaccacaaattgttcctctcagcatctccttccttgaaggaatgaggtatggctaatgctctggagtctcttgatattgaaaagaagaaacgaaaataaacgctgagcttttagacccataagccaattgctgaagtcacttctccccagcctcagcttcaaatagcggaggaaggctgcctgcctaccccttccgaaaggacaatccaattgtaaatattatctgcacttctaagaacatttgaatggtaacactcaagcaattactttactttcaagatcattaaacacaaatctgacttgtactttaatagggctgccaatgttgttaatggtggagagggtggcataaaggctaagttttttcctctaatgggtgaatgtttacattattaccctttctgaggagtgctgttgctgagagaggttgctcaatgcccagagacattttttttctttctcacaccccagaatccaacccctcttttgccaaatgcaatgtcagaacaggtaggaggtacagcaattgtggcatgggccatgacagtcccccaactcctttctcctctgggttgctcacagtcagtctccctcacccagctcctctccatggacatgtcagggtcccagcaaagaaaatggactttggaaggaatgaacaatatttttacttaggaggctccactctcatgccttgaatcttagctccctgctattttcctcctgttttagagaacgggggttctaagaacggtgccagaggcaactgtctagaggcctgcatcctctgctcatattcagggtggaaggggccagctttgcaggagggaggcctgtagactttgctctcctttttccccaggctacctggtctcttagaggcacctgcagtgccaccttggaggctatggaaagacaactgctgtcatcgtagaaattggacactggagtctgcaaaaagcctcctggaagggacactcactcgctggaggtgctgactcccaggggttggggtggtccattccttgtcccccagcccacaacacacacactcaggccattgctcgtccttcactggtagacctcatagcatgtctcatggcccctcccttggcttcctatgaaagtgacctgggtggctgcctatggagtgagatctcaggttcacctagaagccactctgtccccaaagaattctgtctggcagtcgggatctgatagtcctttgataggcagggtctggtgcctttcattgctcattgagaaactggactgaaaatagaagttttgaatgttgggtgagcagagcgtgctgtcagggcagtgtctatacagtgtgtttcccttttaacttgtggtttagtttcaggtatgattaagttatacatttccagaaagcaaagacgttaggggctcagactttgggattacattgccctaattttaattgtcttggtggtttctagctgtgtgacctcaggcagtttattaaactctgtgggccttatttcttcaaacataaaatggaggtggggggtagggggtgcaggggtgagagtggagggttggggggattggggaggtagtggggagactacagctaataatccttatttcacagggtcgttatgagggttagataaatgtaaagtccttgcataagctgcttcatgggaagtacttaatgatcatttctctgttgtgaaatttgcttcctttgcctgctacagacatttcaaacactacacatacagcaataaccaagtagaaaagtctctctgaggttgatgtgactgatatcggtcatttttttatttattttttccttagatttatttatatttatttatttatttatttatttatttatttatttgagacagagtctcaatctgtcaccttggctggagtgcagttgcccgattgtggctcaccacaacctctgcctcctaggctcaagcgatcctcccacctcagcctcctgtgtagctgggaccacaggtgtgcaacatccctgccagctaattttttgtattttttgtaaagacggggtctcaccatgttgcccaggctggcctcaaactcctggacttaagtgatcctcctgcctctgtctcccaaattgctgggattacaggtgtgagccaccacacccagctagtcattcttaatatcagcttttgatggaagaggagagatgaagaaaggttcagaaaggagcctccaaacctcagcgacaggctctgctgcattcacacttctgtcgagaacccgcagcttctccattttgtcccaggtaggtgcaagagtgtgagggagcaaatcctccctagtgcctattcttctccgggacaaatattcatttcacttttttttttctgtccaggtaattccacaagaattgccatattcatatctattcgatattctactctagcaatgggacccataacatgccttatattcattggtcagaaacaaaatggcagccaaaatgattttccaatgggctgagaaggataggaaagttggcgtttggacggagacctatggttgctctggaccctgagtgagagtcatgattctggagccatcttttgtgcccagatcaactaataacagacatagccaagcccactgatttaatcaatgtgtcccccagcttctccttctctggccagctctgttgatttttctgaattaattcttttgagtaaggaaaagatcaaactctgggatcccttcagtgcctaagtctactggtttattcaagaagagtgagagctctgggatttggaatctcacttctgtcctagaagacccgtttgtgcccctgaagaatagaagtacctgaaaagcatcattttgaggagtgtgcatttaaggtttttccttgagttttcctcactaatgaggttaataaggaaatgatgcttccaacaatagctgttactgctaagcccctgtggagataaaagatcagtggtaagatctttcaatgccttctcattttaaactcgtagaattggtgtctggtacgtgcacataattcagttgtttgagggatttgcatctgcactactcactggtcttccacatgcattcactaggttttatgtctgaaggaggcaggcgtgacatttccaagtcaaagccggctgacttctgtcagggagctggtagagttattttaaaagtttagtaacatgcttttctctataaaataatatctgctaataatagaaaatttagactccataaataagcagaaagaatagtagaaaatcacccatcatcctaccacctaaagatagcccatgttagcatttggagatactgttttctatttatttatctattcattaatttttaaaaacataatatgatcacacaatacaaacaattttttcctgctttttttcagttaacattatggtgtaaacagattattgaaaatttttaataaatataattttagtaactatatgacatttgtaaaattcatccaaccatttctatattattggacactttctgattttttgttattacaagtaatgctagttatggcatctatgagtagatgttttatttactataataaacatctgtgagtagctgtttactataataaacatctgtgagtagatgtttattatagtagtagctttagtagtttattatagtagtagctttagtagtttattatagtagtagctttttcattatgtgagattatttccttaggtcagagttccagaattggaattactgggtcagaagggataaatatttgatagctcttaatctataatgcaaagtagaaattattatgttggcaaaagggatggatttgatggctatgaaggccccttctggtgctactagtctgtgtttctaagactctttcttcctcctatgttgatatatctatcaagccactataacatagaggcttgccagacattgatttttcaacattgaacatttgagacagtgtataaaataatcatcaaaaaggatttgagtagtatgtgtaagtaatattagaaccctcaatcaaacacacttgagcaaaagagactcatttattggctcatctaattaatactccagaggtaatacgcattcaggcatagttgaacccaggaccttggttttcttctccccatcctttggtcttgttttcttctctactggcttctcaggcaagctctcccattttgctcacatgatgatgccagaaactccatctttatctttcaagcaactctagtgaggaaaacttgcctctttcccattattccagcaaaattccaagattaatacttaccagctctgactggcctagtttgaatcatgcggctatggtaacaggcatattatactcccattttgcctggactgggttacatgcatttctctagagctggagaagaagtcatcttcacctaaaccaatattgactaagagtggaagagagtccgccaagagagaatgaggaaggtttaacttaaagaaaagaagatgaatgtcagctgagtgagaacagtctctccattaaaaagcacttctcttttagagtgctctctagaacccttcctctaggatacaaatctctaacaaggtattgccttgaataaagaaagaccctgagccctcatgaccttctataggaagcaagtgactgttaatatcaggtaagcaggtcaccacggaagacattcctagaaaaccaaacccatttcttcatttattcatttggcaaatattattgcagcacctaccatgtatcaatttagcatttatttagctgccaatgttctaggtgctgggggcacaacaaagattcctgtccaatctcgccatctggtttagccttttgaaggtgctaatgaattctctgaaatgtctctgatgcaccccgactgtctataggccatgcatgtgtttatttacaattggaatggctcattgccgctctggctggctgggctataatttgctcaggcacttaagcttcactataaaaaaaatccaaaaaaatcactgcttcttcgctagtttcaatttggctgttatgtttatactgaagattacctggatgaagcactcagcttaaatgcagcagaaatgtaaaatagggcatgtgaaagaaaataggtatggatggctaataaatcccctcaaatgaagagagcttctcatgcagccttagaagatatttgcataacctaatttcccatagcaggatctttgccgctattcattcacatgtttaaatctctctaaaatagagactggtcatttatacttttacctgaataatagtcatttgtaattttacttgaatatcctaacaaaattttagtgagaagcatctccctacagtatgataccatggaacactgtgaccaaaagatgtgttgaaattagtgaacaagtgtccactcattcaataaatattggccgagccatgtgccaggcactgttctaagagtgctcttgagccaagaaaagatcctgaggtagacaaattattcaaggtaggactaatatggtttggctctgtgtccccacccaaatctcatcttgaattgtaatccaaattgtaatccctaggtgtcaagggagggacctggtgggaggggattggataatggggacagtttcccccatgctgttcttgtgatagtgagtgaattcccatgagatgtggttgtttgataagtgtggagctcttcccccttgatgctctctgtctctcacctgccgcaatgtgcctgcttccccttccaccatgattgtaagtttcctgaggcttccccagctatgtggaactgagtcaattaaacctctttcctttataaattacccagtctcagggaagttcttgatagcagtgtgaaaatgaactaatacaaagaatttagacttgcgtttgaaacctttcactgacaaatgctgactgtgtgattctgggcaggtacatttgtctttcaggcttcattttgttgatgttgtaatctgagaagcaaaggcaggaaaggcaaagaagaggccacagtgtgaagaggttaggagctcaggtgataatctctctgaggcccgggttcaattccctactcccacttagtagctgtgtgacttgggtgagtttcttctctttaatcttagggttttcaattgtaaaatggagtttataagagacgtgctttataggattgctgtgagaaacacttgcgatactgcattgaaagcacttagcctagtgcctggcacataaggatgcctcaatcaacgcgagctgtcacttttcccattactgctatggttactgttattgttgttattgctatcttagctgacaactttaataattacagttggcactgaattcattcattcattttatatatacgtatatatttagtgagttctgctatgcaccagggacactctagtgatggggaccaagctatgaccagtcagaaagacttttactggctaggagcttgaattctagtgaagagagaggcagatgataaattagtaaacaagcaaacaaatacagaaataatagtttcagagagtgatatttgctattaaggaaataaaatggaaaaactaatacacaatgactggaagtagggggagtctttaaatcttcagagagggagacatttttcctaagaggtgaatgctgagaagataacagttacgtaacagacctgaagaagggctttcaaagcaggagagatagcatgaagatcctaggaaagccagggtagctagagagtagctgacaaaacaggaaaatgacattaagagaaaaattggagagatgagtgccatgatcgattagtgatgtctgtgcatggcaaagaagatgaagaatcagcgagaacatcacacatttgcaagccctgctgtccctaaagtcccttttaattgctagtataaaaaacttccaggaatctcctacctttaccctataatctgaccaaattagaagcatacagccgtttaataatcatatttctgattttaagaattttaagaaccaaagtttcttgaggttatctacttctgggttgaataagaaataaggctatttcctggttaagaacaactatctcggccgggtgcggtggctcacgcctgtaatcccagcactttgggaggctgaggtgggtggatcacctgaggtcaggagttcgagaccagcctggccaacatggtgaaaccccgtctctactaaatatacaaaaaattagctgggtgtggtggttgagcatctgtaatcccagctatttgggaggctgaggcaggagaatcgcttgaacccgggaggcggaggttgcagtgagccgagattgtgccattgcactcccgcctgggcaacaagagtgaaactccatctcagaaaaaaaagaaaaactatcctggtacaaatctggtgcgatggtcactttctctctcctctgtcacatagcagctgagaagggagagcagtttcactagagctcagcttcatggttggttttattctaagctaacaattatggtaagctatatcaaataagtcaatggaaaaaaattggccaaaaataggagggttgagatgaacatttggttgaaccaatgatttgggtgaaagtaatttccacagacactggatttgctacataaaaaacccatacacacacagtgttggtgcacaatgggaaggttttgtcatctttgatgtggctgtatatatttatgccattttttcatttttctatttttaaatttattttcatttatgcacttcatctttgtactgtttgtaatatacaacctgaatgtaatcaaactggagattggttaatactgtatgtgataaatgttagggatgagctgactaaaacatacatgtgttttatatgtatacatatagaaatgtatctgcatggatgaacatgatggaattaacaacggaggatgtctctgagtgaagctgatggtttaactataatttaaatactatattctgattttcatatactggttttgatattatactggtttggatattataaaaaattaagtaataaagcatgaaaggaataataaaaaagtatctagaaatttcagaaggttgttcgaagtttttgttcatttcaaatttattttcagttcattgtaatgtctgctctgctcatttggatgtattttcatctatgttataactttttgcacatttgtcaaaaatttgtgttttctattgcttactttttaaactccatacaatgcatgctactttgtaacccattataatatattgttgaattcactacagctgattctttaacttacttccttcttttcaatattatatgcagtcagaacaggagtagctggcagaaatcaatgcaaattttaaaatcgactgtgcacggtggctcacgcctgtaatcccagcactttgggaggccaaggagggtggatcacctgaggtcaggagttcgagaccagcctgaccaacatcatctgaaactccatctctactaaaaatacaaaaaaaattagctgggcgtggtggcgcatgcctataatcccagttacttgggaggctgaggcaggagaatcacttgaacccgggatacggaggttgcagtgagccgagattatgccattgcactccagtctgggcaacaagagtgaaactctgtctcaaaaaaaaaaaaaaatcaacaacatagtaacaaatcttgaaaatttctgaaattcagataaaattgtttgaagatccattgtaagttgcaaaaccattcccatgtcatatccaaattatccatatgagaaacatagtgagtaggaatgattgtttccagtgattatctcaaccaatggtgtgcttccacagaaagcctctctggccttcccacagtcactagcaaggctctggtggatgcctgaatttcacttactctagcttcattttcgagaaataatatgcaaatgtcctttttgagaattggagttcaagaagaagggctcagtcaaactccaaagtaacctgtaaatgcatttggagaggtatatgatgttaaaatttttctctgtctcaacacacacacacacacacacacacacacacacacacactcatactttctctttttagttttagtgatatttaatttttatttccaattcacattccactcaattcttaaaagtgtggcagtctaccagctctctagtctcttggttatgtaatgattggaaaaacaggactgtttcaaggaaacttacctttttgtttgtttgtttgttttaaatcttagattcaggaggtacatgtgcaggtttgttacatgggcatattgcataatgctgaggtttggtttctcttgatccggttacccaaatagtgagcatactatctaatagatagtttttcaatccttgtccccttccttccctctctccttttggagtccccagcatctgctgttcccatctgctgttcccgtctgtgtgtacccaatgtttagctcccacttctaagtctctctctgtgtctttctctctctctgtctttctcttgctctctcttctgagatcattttagggctcatttttagaattaccctaggtattagatattgagtagcccaggctaacctgagcagagtctgcagctttactttgctgtggaatctagtgcaaagtattctccggcccctttgctacacagtcttcttaggcttaaagcacacaacccttattggtgccccctatttctgaatcctgccacatcctggacactgggatttcttaccctggcatcccagcctccctgccagcttcatctctcttcattttcccatgatgtcctaatcccaaatgacctgcttccactctcagctttaggcctttcaactttcggttccctctgcctggagctcccccactcccatctgagggcccatctttttctgctggctaatttcttccacttccttcaagactcagagcaggtggcagttcctctctgaagctttcctatttttgttttccctattctgtatccccttcaagttgggctcagaacctcttctgtctcctcacattatcttcctgggtggtagctatgaatttatatgctctactcccgggtagtcactgagctcctggagggcagggtctgtgtgctatttatatctgtgtccatgcactctcacctggcattgtccaacagaacttcccatgatgaaggaaaggttctgtgtctgcaccgtcctgtacagtagccactagccacaagtggctattgattatttgaaatgtggctaatgcaactgtggtaatgaattttttattttgtttaattctggccaattgaaattgaaatagccacatgtagctagtggctaccatattattggacagtgcagattagcactttatggagcccgtattaggtattgaccttgaaggagcatgatagttgtattatattttttacatgatggcaaaagatgttagtcccttttatttttagtgactttgaaccctcaaatccattaatattctcctctccttcactggcccagaagagcaagtttatgaattcattcattgtcctattacagctaagcatagaggctccgggttcaaacacagccagatttggatctagattcaccacttaccagcatcactagccacatatccacaccaagttattgaacctctttaggaaccaatttccttatctgcaaaatgggatggttgataatacccaggtaaaggctatttgcaatcattaaataagagaatgcatgtagaatatttagcgcattgcttggcacacagtaagcatccaaaaacattaagcaattgtcatttattcttttattcatataaaccacatttattgagcacctaccctgtttcagatgctatgctaagggacagagataaaaatttttcaagccaacgagaacaaaaaaaagggaatataagaaaaatgatagattggaaagtcacgtatattatcacaagatgaacatcagcgcctcatttttaagcttaaaatcatattaaagtattttatttgcccaggagtaaatttgaccccattttttaaacatggaggcccagaatttgcattcacactatctaagcccttacaatatgcttgttaattagtgttcaggctagaaaagcattatttttcatcatcaagtaatgaatttgtgtgtggtattaagcttttatattgtaaaattcagctcaaaaagaaagattttttctgctccacagaggactgaatttttcaactgtgatatatcatttatgcatctcatccattattgatgtgtgacagcttttacatgaggcaccgaccttttaaaataaaaataaaactacatcgtcctgatctgtttcttgtcgatattgtttttagagtacaagagattcttgtgttctatggaattcactttgaagcttcctttctttgaaaagaaatggcaggaaggcccccaaacaaactgggctttcctatttggtgcaagagctctgtgcatgtgtctaatcttgaattctgaagtgcaaatgtcatgtaatgaaagtatcagcagttacttaaatgtggttaaatatggaaactcggcataaagtcgatgtttatttgcagccagtgacagtgataagggcaggagccctccgataagtggcttttagccaccgttaatcggctgatggatggattggtgcaaggctggtcacgaaggaagccgtctcaccctctgtaatggaacgtgctcatctgtctagcagagggtgagaaggagaccatgtgtgctgttgattccattatgctgctcagggtaacctctgccgctggtgagaggaggcaaaaatcaagagaccttgacctgaatcatagtggaaacttagagacttgcagaatgtcacaactggaagggatcttagcgatcatctaatccaacccctgtatttttagatgaggaaaattccatgcgtaaaaagacaccagtatttattaatcaatgtacatatatttactccctgcataaaatcacagctggctgcccactgcccttaaggtgactccttattaagacatcaaggcccttcattgtctggattctgcttccttcccaccccagccctcatatttctttcttgctctctctgtctgtctctctctcctcatgctgtacctcgactggggagctccagtgtgagtaactcctgttctagctttaggtgtctgcttggatgacagcaacacaaaggttttccctgactctccagaactgagctgggggtgctttctgttacccttggttcttattcccctcctcatgattaccttactgtcatatttgtctttaactcatttgtctcctacttgatcaggagctctttaaggatgtctcatccatcattgtataccaagggtcttgcaaggtgcctggcacatagtaggtgctcattaaatatctgacactaaatgaaatggttaattatatgccaagcattacagcagataccagtaatacaaaactgactaagacacattcctgccctggaagaaatcaggttagtccattccatttattcatagtttttcctaaatagggcatttttttatcccgtttatgaaatttgaagaagttgcatacctagaagctttgagaaaagtgcagggacacttgaaattcccaaattttcaaacaatggttaaaaataccccaccaggttgggcgtggtggttcatgcctgtaaccccagcactttgagaggctgaggcagaggatcacttgaggccgggagttcaagaccagcctgggcaacatagaccccatctctattttaaataaaataaaaattaagaaaagaatatcacaccattagcatcagacaaaaggaaccacaaaataatttaatctcaattaagctgtcccctcacaagtagtaagaaacaagctcatatttgtggtgtaaaagaaccactgccagggtgatctcagtgtccacagctattctttcctgtacatgcccaggtgacaggcagggatgagaaataggagccctgtggaatgttaggacttgggcaggctttggaatgaccaagctctgtcccctcctcttacagaggagaaaatggcaggccaaagagaatcattggctcaaagtcaagtaccaagtgagtggccaccctaggcctctgggctgtgtcccttctccaatgaggtattgtgaccccacacgtcaccaccccaaattagtcatcttcagacacatttccaattgtggtagtggacattggcttttttggttggcccagcttcccgtacaattggtaacagtaccctaatttttattaggaaaactacgactcccacacatgggggagctcgttccaccccagcttcaggcatgcatcctgagtgactaaagtcaatgcaccttccgcccagcactctggtttacaatctaagttgacttaacaaggaaggtccttttcaaccgagctcttgtctagctcttatcatagctagagttcagggttaaaagcccccccatgatcttggctcatccagggatatctgatattggggagggggcaggatttaggaactgctcctcgacatgggaatgatttacaagtgccaacaaggctccttagtgactgctggaagataacttccatcaaagacagcaatagtaaaatcagataaagacagtctttgttttagacatcagcaccccaaccctcactcccttgaactcatagttcagggaagtccatttactgccatgttccagccggcttgttggatttctgtttgtcagtaatcttcagttcccagccaccaaaaaattaattatttaatcaaacaattaattagtccatgcagttagctagttcatggtgccacgtaccctgcaaaggtgtaaaaagctgctgctgattctcaaatggctgtttggatccacctgcagacactggccaccttttttttttagacagagtctcactgtgtcacccagggtggagtgcaatggcgcgatctcagctcactgcaacctctgcctcctgggttcaaatgattcttctgcctcagcctcccaagtagctggggttaaaggcgctccccacttcgcccagctaatttttgtatttttaatagaggtgaggtttcaccatgttggccaggctggtttcaaactcctgacctctagcgaatcgcccacctcagccacccaaagtgctgggattacaggcgtgaaccactgtgctgaacctcaaattttttcttaggcaattaatttcagttcagaaaacttttattgagcacctactatatgccaggcctgcatgaagcgatacataaatgggtaagatacactcttggttttgaggggcttgcatggcataactggggagtcaggaaggtaaaaagtgctgctggcctctcattctgaccttcctgaagccaatattctggggtcaaattcaaccaaggaacttacctgtccagggcggctctggcctcagctcagactgcatatgtttaattttcaagtgtacaaggaattttaaaattttgttttgagaaagaaaagtatcccagaatgttaagtacagaggatcattactgcaatttcttcataatgagagataactccaagctcacagtgtgtattttttaaaaataaggctaaataataggttggggctgctttcagctagctgcagcaatgtttatgaacgagcaaacctctggtgcatctgggaagcaggagatgcagggcctggtaggagtcatgacaccgcaaataagaatgatcctacaccaaaacaaaaatactgtgacctacatgcgctctcttggagactgctgcttggttgttattaatgtaattagggaaagaacatgtaagagtgtgtttagaagttcctggtgactttgttagagtaccactttttagaaagctaccacctatcaaaagcctgctgtgtgttaggtattttatatggcaatgacttcatttaatgctcattaactgccctgtgaagtaggtgtggttgtctacttcacagcttggaaaagttaagaaacttgctcaaaggcatgcagcaaggaagtccacagtggctataacaggactcgcctactgatgactgtgccacccatagaaaatgaggtcaactcccaaccctaagagcaggtgtcataggtattttatatgttcatagacttttattaggaaacatacacataaaaatgtataatatgtatatgtatatgcagtttaaagaataatgagagaacaaattcttatgtattcaaattcttatgtattcaccaccaagcttatgaaacagaatattgttatcattttgtttgaggtttcttgttcttttttctttatcatctatatatgtatatgctttagtatttcctgtttttataggatggaataatgcattatctattctcccgtgacttgattctttaacattatattttagtgatttatccaagttgattcatgtagatgtagtttattcaattttactgctacctggcttaccaatttgtgaatatgccacaatttatttattcattctgttgctgatgggaatttggattgtttctggctttactaacagcactgctgtgaattttcttgtatgtacctgttggtgcacacgtgtgtgttttagggtaaataccagtggaattgatagagtgtaagcatgggttcctcttgatgataatgccagagtgtttaccaaaggactgtaccaattttaattcccataagcagtggatgagagcttacattgttctccaatctctccatcctgatattgaccagtttgtaaattttcaccattctggtggtattttcttggaatgctaatttgcatttactgatcattcataggtttaggcaccttttcataaatttaagaaccatttgtgctgcttctgctatgaaatatgtgttcaactcctttgcccctttttcttttgggtttcctttttcatattgatttggagttctttatattttctgaatgctagttgcattagttcgttttcacactgctacaaagaactgcctgagactgagtaatttataaacaaacgaggtttaattgacccacagctccacatagcaggggacacctcaggagacttacagtaatggcagaaggggaagaagaagcaagtatcttcctcacaaggcagcaggagagaggaaagagagcggaggaaactgtcatttataaaaccatcagatcttgtgagcactcactcactatcacgagaccagcatggaggaaaccacccccatgattcagtcacctcccaccagatccttccctcaacacatggggagtatggggattacaatttgagacgagatttggatggagatacagaggcaaaccatatcactaatttttatcagttatatgtattgtaaatgtattttcaatttgaggcttgtctttttattctcttcagggcatttttatttatttattttttttgaaatggagtcttgctctgtctcccaggctggagtgcaggggcgtgatctcggctcactgcaacctctgcctcccagattctcccatctcagcctcccaagtagctgggactataggcatgcaccactatgcctggctaattcagagcattttttaaaatgagcaagaagttcttacattttaaaacttttgggctgggtgcagtggctcatgcctgtaatcgcagcactttgaggggctgagctgggtggaccatctgaggtcaggagttcaagaccagcctgactaaagtggcgaaaccctgtctctactaaaaatacaaaaattagctgggcgtggtggcaggcaactgtaatcccagctactcgggaggctgaggcaagagaatcgcttgaacccagcaggcggaggttgcagtgagctgagatggtgccactgcactccagcctgggcgaaaagagcaaaactccatctcagaaaaaaaaaaaaaaggctttttatatttcagactgaaggaaaagttataaaagtagtacaaagattttttcatccagattttctaaatgttaacattttattgcatttgctttaacactttatctcttttatatttttcttgctgttgtaaatggtgtctttaaaaattgcatattctaacttggtggtgtttagagatgcaattgactttttatattgtttttctatagaattttgataaactctccaattctaacatttttatacatcatttggcatgttttccaggtaagtaattaagtcatctgcaaataatgacagtttttgttttgtttccagtctttttgaggttatacttctctgattgatgccttcagtaccaagttgaataggtacgttaatagtgagcattcttgtccccttccttgtcttgaaggcaacattttcaacatttcaccataaagaatgatgtttgtggtagttttttgtttttcctttctttcatttttgaggttgcccatgattgggtgtggaagttccctctcattcctagtttaagaagacttttgttttaaaaaaaacatgagttaatgttacattttattgaatacttttctctgtgtttactgaaatgatcatgttttttttctcctttaatctgtaaatggagtggatttcattaatcaattttctagtattacattcttgggataaacccaacttggttttatgcattatctttgtttatacatggctggattcagcttgccaatattttgtctaggactttggtatctatgttcatgaatgagattagcccgtcactttcgttttgattctttgtctagtctggataacaaggttaatgttttggtcatcttctgctacataaaaatttgttctaggtatttgttgtacgtaaaaaactaccccaaactgagtggtgtaaaacaacaacaattatttattgttattatctatcatggctctgggggttgacagggctcaactaagtggctcttgattgggatcttttgtgtgtttgcagccagagggtggctgggaatcacttgaaaggctttcttgctcatttgcctgctgcctgatttgggaagactcaaacaggtggagctggaaagctgagactcacaggtatctctttctatctctatttgttttggtttcttcagcatggcagtttccaagtcattgagctcccagagacttccagagcaaatatcccaacagaaactggtagaagctgcatagccttttcaaatcttggaagttatatggcacctcttctgctgcatcttgtttgctgaggaagtcacatcaggtttcaggggagggcacagagacttcaccctttttttctcactatattgcccaggctgaccttgaactgcccaggctgaccttgaactcttgggctcaagtgaacttctcagactacaggcacataccaccatccccagctgacttcaccttttcaaggaagaagtttcaaagagcgtgtgacacgatttaaaatcattatacttaaactagccccataaaataatttcagcagtgtttcctctattttttcatcctccagactatttgtgtgagattagcattaatctgttctggaaattttggtagtgctgatctgtaacaccaagtggaccttgcattttctttgtggagccacttttgactacacattaaattttgaaaatggatatagggctctttatcttttctgtttcttgttgaatcttatttttaggccatgtagatttattactcatagataggcagcaaggataaacggaagcctaggatccatggtgagccggtccagcagggctcaggaaagctgcccagggtagatggagtctcatctccctgtgccccatgttgcaccacaactgaggggcctcaaaatcactctgctctggcctgggtttatgtgctctgggcgtcacttggctcactgagcaccagtgttgcagaatatccagttctagaaggaataaggacatagccctggttgttttggacatttcctccttatctcaggatgttgcattcttagtccatcctgcctgagaaatgcaagcaagagagggaagagctgggtcagccaaggtcatctggagacgtgtgctacaattgtggtgcctgcaaactctattgcaattagtcatgtacaacatactttcccagactatgagctctttgaggccaggaactatttataatttatctccatattcatgtgcctggcaccatgcctggctcatcataaccctcttgccgaatgcagacagtagagtaaaagcataaagaagtgtgtagtcaggaagtctgccaatttaggcagtcaggtggaaggtttaacaggggaagcaacatttgagctgtgcttgaaagatgatttggtgttagccaggcaggagagcggaaggaaagacactggaaacagcaccagtaaagcacagagatataacacagtacaggataactgcaggctgtattagtccattttcatactgctatgaagaaatacctgagactgggtcatttataaaggaaaagaggtttaatggactcacagttccacatggctggggaggcctcacaatcatagtggaaggcgaaggaggagcaaacgcacatcttacatggtagcaggcaagagagcatgtacaggggaaatgccctttataaaaccatcagatcttatgagactttttcactatcacgagaacagtacgggaaaaacctggccccatgattcaactacctccagctgggtccctcccatgacacctaaggattatcagaatcacaattcaagatgagatttgggtgggaaaacagccaaaccatatcagagggctataggtcagtgtcttcagagcctatcagagtgcttggctcacagtgggtgctcagtaaatgcttgtagatgaatgaatgaatgaatatattgatatccttaactttcttactataggaacatttctgtctataagaccaaatctattgtttgtgttttaaaatgtagattttattattattcagatatgatgaagccaacagatcacgagatgatggctattgcaaagatagtttgttactcaagtttcccaagaagaggggacaggccacattatggggttggggacacataaggaagcactagggttggtcaagaggcagagggagcaaggggaaaacatgggcaagggcatttatggtggtttctgcaggaagaaatgggcaaggcaggataagcaagtttaggcttggttagtttgaataatttcagtgtgctctgaggaataggggctgtctctagatacctggtacctagccctggagtgattagggcaggtaggtattagccctgagtgtgagaactcaacaaaggaggtggttgggctatgggctcttaatggatgtgtttgcatacaaaaagtgcacttgtagatgagtttagtttagttttgttttttttttgagatggagtctcgctctgtcacccagactggagtgcagtggtacgatcttggcttactgcaacctccgcctcccgggttcaagcaattctcctgcctcagcctcctgagtagctgggattacaggcacccgccaccacacctggctaatttttatatttttagtagagacggggtttcaccatgttggtcaggctggtctcgaactcctgacctcgtgatctccccaactaggcatcccaaagtgctgggattacaggcgtgagccaccgtgcccagcctgagttttttttactatccctaagaattgtctaaccctgggaagggcagttccccaagattcatcaaggtcccaagatgtcaatgcagcaaatattgaaactagaaaacacaatgattgattatactttgacaattagggaattctgtctcttagatcatttggtgatagagctgtgatcactgggaactttcatgacctgttttgtcttgataccacccattttcatgccaatttttgccatattttattatttcatttattcattcatttaataaatacttactgagcatccactgtaaaccaggccctgtgtcagactctggccctcgcaacttggtcaagagagacagcctaggaagcaagtggaattcctgcctgcatggttagtgctctaatgaagccctaaatactgttatcttcagaggctccttgccctcccctggattcctcaggtaggaaggtaccttgatgtcaagtttagtgccatctatggaggcagtttcatttctcataatggaggatttgcttttaatcaaagagaaggccttttgtcagtctgagagctttgtcttttttgtgacttgcagatagacattttaataataggactagatacgtggctcttggagaccaggctgtgactttaaatagtgtgaagaccccaatggctggattcacaggggcaatctgaatactgatcatgaatttttaaatggccttagaaagtgcagcatgattttaggagagatttccaattaacttgggctgttcaaagcagctctatgcctgggaaagagaatgcatgagaattttccaaagagctttttctcttgaaacagaaaatataaatggtagtggggggaaaaaaatcaaagttactgaatatggaaatcaccactttggggtttatgagaaccacatcctgctaactccctgctatgcgatggggctttcagaggtaatgaggcaagtaccagagtgtcaaatgtctgccttgctttacacttatgtgtgctcttgtcctggtcctcctgctggtaggctacatgctcagcccaggcagagatggtgtctgactcctccttctagtctcctagggaaaatcttgcactcagcaggcacttaatgcactctggtgggattgaactgaaaagacaagactccccaggaaggcatagggagtcctcctgttgcctattactctgctgtgaattggaggcacagcagcctctctgaggctacaggcaaaggcttttgccttctggatggaggaaggaaactagctcttactgagcccttaccatatgcctggtaggcaccttgcagcattttttcatcaaacctcttgataaccctttgtaattggtattgttacccccattttacagatgaggaaatagaggcactgaagaataagctctcctgaacgattttcactggaaagatttttcaacattccatctgtccactccaccagcctgagacaaccatctttactgaggttttgaatagttaagcaggaggtaatgcactcttaacagtgtttaaaaggattaagcaattcaaagcatacctccaaggaacccctgccagagatgctgaatcttgagtttgctttcttcctctgaagggcatctgaactttcacctgactccttatgcttagctcaaacgggggcaggttcaagcaggaaatcggatggcctgagaggtgctgccactgtaattaagaacagagcagaccattgccaagactcaagaaagttgtatgcctcttaatctggtttgtttcattaggccttttactaatgcccaagttatggcccttctgaaggtggctagaagcaggtgttggggtggaagtgggcctaaaacccagagcccagtggctgctccgcaaaagagagatgggcaataacattaaaattatatttatacctcaacttagtccacaaaactgaggttcaagcactgaaccacctgcctgatcattgtcaccacagggcatgatcatttacagtctggatttgacaatacatcagagagcatggacttatgtttggacatttaaaaaccgcctccacgggaggcagagtttgcagtgagcacgggtggcagagtttgcagtgagctgacatcacaccactgcactccagcctgggtgacagagggagactctgtctcaaaaaaacaaaacaaaacaaaacaaaacaaaacaccttctgaatatcgcattcaaaataaatttttaaaagttatcaaaaacttcctaaatgatgcagattcttaggatgatacaggtatttgactttgaagaggacaaaggctgattgcaattcttcttctgacacgagactctccgacagtgtgtgtggctccctttactttccacatcttccttctttcttctttcctagcttcattccttctgtatctcctgcatctcagacatcatagcagaaactgctaatcatttttcaatgtgcattctcctcttcttccttcaggagaaccctcaagtttttgctgaggagatagctgctcagttaaaaaccagatttctcagcctcccatgcaactatgtgacaatgtgactcttttcttgccagtggtgtgtgagcaaaaataatacgtgcaacctttgaaagtgcaattaaaaaaaagaagaagcatgccctgttcttcctccactttctcctttcctctgcttggcacatagctatgatggcaggagttggagcagccattttgggccatgagatgaaagccttatattgagccatgttttgagcagaagaacagaaaagaaagaacctgggcccctgacattactgagccaccataaagacctaggctctctacttgaacttcaggtaagagagaaataaacttcaatattgtttaagccattgtatttgggcgtttctctattatagcagcctaccatgtatgctaacagaagtcatagatgtatcttttttttttttttttttgagatggagtctcgctctgtcacccatgctggagtgcaatggtgcgatctctgctcactgcaagctccacttcccgggttcacaccattctcctgcctcagcctaccgaggagctgggactacaggcacccaccaccacgcctggctaatttttgtatttttagtacagacggggtttcaccatgttagccaggatggtctcgatctcctgacctggtgatccacccacctcggcctcccaaagtgctggaattacaggcgtgagccactgcacccagccaatagatgtatctttaaagccagctataggtaatattcaggatagagaattaatgggtaacagactggaagtcaacagaacaattcacccatccatgacttgctggtcaaaactctttagcagctgaaagactgtagaagagcatgtctcgtggtagcatccacccaagaaaaggtggaatggagaggtttcaatggaatggaagtcagacagacatgagtgcacttattagctctgtagctttgggtaattcttaataccctttctcagtttctccttctattaaatggatacaataactcttgcctgactattttgtgaatcaacaagaccatatgtttaaagagaagcatagtgtgaatgaaagagccagaaggtctggatttgagtcccatctgccattaacttgctgggttgccttaggcaagtcactgcacttctctgggcctggtcccatatccttcaaatgcggaagtttagactagattatctctgaggtcttttcctgctcagacattgtatggttcaacaaattaggctataatattatgatgagagtcagaatttacagcaacattttgctgaaggtggcctggctggcactggttcctgagagtggattgtgtgtatcagttcttaaattggtagtcagttcttaaattgggtcaggatggcagcttgaaataggccatagtaggagtatttacaccacagaaattggcaaacactatgaagtggggctcccccctaccctccacagagagctggttgttaagcacttacccgcatgccacttactacaaggaaagaaaaagtttttgtatgctttggtgctcacagcagcaaataactagtaaagcttaagatgagaacgtgcaatatttgtctataatgtacggaggactgagggggaagaattagaagttactccactcctagatcccaggtgccctggtccagtgctaagttatagtaaatgggccccttgtggcatgaaggagttagtatctcttcctcagtcactaatttacctgggcttattgtcctgttgtgcttctggtgcaccattttgtaatttaattaaaactggaggcttgagataatgggctggtcgtgcctgcaaccccaccctgggtaaaagttgggcccctgggagcaggaaaaaaggtcttccaaggcaccaagtgatcaggagcagtcgttacattattccagttaatccaaatgaagtagttacctaaggccctgactgatctagccaagtgggacctgtggcttggaaaatgtttagagattctggaccaagggattacccacttactcattctcaccatttagagtgtcttctccaaagcgtattttgagatacagcacttccttggtatgctggtagcaatccttcccaccccaaaatacctcatggttaaataagtttgggaaacactgaatttaacaaagataaacaggttatttatggcactactcctcagacattttcataaattaaagtagtgcttctccaactgtctgtggtgatggatcagattttaaaatttctattcaatgcatgatttggaaatcaatacatcctattgcccattactaataacagctcttgtcttgtgcacttattgtgcaagtgtggacattcaacctggtctaaatctttcaatgagatgagttcatggctatgcacttggatgacccagcaatgtccaattgctataaaagtctctagttgggagtgagaccggcccttcggtttgcacgggagccgggtgaggcctgtgactactggctttcctccacttccctgataacctgcatgactcagcagaggaagccataatcctcctaggtacacaactctggtgacccgagagtctcacccccattctccacagcagctgcagcaagacccgcccaagacaacctgagctcagacacacctagccctgcccccacctgatgctccttccctacccaccctggtagccgaaggcaaagggcatataatcctgggagtcctcacccactgctggtccctctccatactactacagctgatgctttctggaaagtgccacctcctggcaggaggccaaccagcacaaaaatagagcattaaaccaccaaagctaagaaccctcaaggagaccattgcaccctgtccccaccaccacctctactggaacaggcactggtatccatggctgagggtcccatagaaggttcacatcgcaggactctgtgcagacaacccccagtaccaggttagacttcctaggtggctagacccagaagagagacaacaaccactgcagtttggcccacaggaagccacatccataggaaaagagggagagtactacatcaagggaacaccccataggacaaaataatctaagcaacagctttcagccccagaccttccgtctgacagagtctacctaaatgagaaggaaccagaaaaccaaccctggtaatatgacaaaacaaggctcttaacacctcctaaaaatcacactagttcaccagaactgaatccaaaccaagaagaaatccctgatttacccgaaaatgaattcaggaagttagttattaagctaatcagggaggcaccagagaaaggcaaagcccaatgcaaggaaatccaaaaaatgatacaagaaatgaagggagaaatattcaaggaaaaagatagcttaaagaaaaaacagtcaaaaattcaggaaactttagacacacttttagaaatgtgaagtgctctagaaagtctcagcaacagaactgcacaattagaagaaagaaattcagagctcaaagacaggacttcaaattaactcgatcaaacagagacaaagaaaaaagaataaaaaaatgtgaacaaagcctccaagaagtctgggattatgttaaatgaccaaacctaagaataattggtgtttctgaggaagaagagaattctaagagtttggaaaacatatttggaggaataatcaaggaaaacttccccagccttgctagagacctaaacatccaaatacaagaagcacaaagaacacctgggaaattcatcacaaaaagatctttgcccaggcacattgtcttcaggttatccaaagttaagaggaaggaaagaattttaagagctgtgagacagaagcaccaggtagctaataaagaaaaacctatcaggctaagaggagatttctcagcagaaaccctacaacctagaagggattggggccctatcttcagcctcctcaaacaaaacaattatcagccaagatacagcctttttcagacaaacaaatgctgagagaattcaccattaccaagccaccactacaagaactgctgaaaagagctctaaatcttgaaacaaatcctagaaatacatcaaaacagaacctctttaaagcataaatcacacaggacctatgaaacaaaaatacaaattaaaaagcaaaaacaaaagacaaaaaaaccaaagtacacaggcaataaagagcacaatgaatacaaccgtatctaacatttcaacactaacattgaatgtaaatggcctaaatgctccacttaaaagatacagaacctcagaatggataagaactcaccagccaactacctgctgccttcaggagactcacctaacacataaggactcacataaacttatagtaaatgggtggaaaaaggcatttcatgcaaatggaggccaaaagagagcaggggtagctattcttatatcagacaaaacaaactttaaagcaacagcagttaaaagagacaaagagagacattatgtaatggtaaaaggccttgtccaacaggaaaatatcacaatcctaaatatatatgcacctaacactggagcttccaaatttatgaaacaattactaatagacttaagaaatgagatagacagcaacacaataatagtgggggacttcaatactccactgacagtactagacaggtcatcaagagagaaagtcaacaaagaaacaatggatttaaactataccttggaacaaatggacttaacagatatatacagagcatttcacccaacaaccacagaatacacattctattcaacagtgcatggaactttctccaagatagaccatatgataggccataaaaggagcctcaatacatctaagaaaattgaaattacatcaagcactctctcagaccacagtggaatgaaactggaaatcaacaccaaaaggaaccttcaaaaccatgcaaatacatggaaattaaataacctgctcctgaatgagcattgggttaaaaataaaatcaagatggaaattaaaaagttctttgaactgaatgacaataatgacacaaactacccaaacctctggattacagcaaagacagtgctaagaggaaagttcatagccctaaatgcctacatcaaaaagactgaaagagcacaaactgacattctaaggtcatacctcatgaactagagaaacaagaaaacaccaaacccaaacccagcagaaaaaaggaaataaccaagatcagagcagaactaaatgaaactgaaacaaacaaacaaacaaaaacccacaaaagataagtgaaacaaaaagctggttctttgaagagaaaataaaattaatagaccattagcaagattaacaacaaaaaagagaaaatccaaataatctcactaagaatgaaactggatatattacaactgacatcactaaaatacaaaagatcattcaaggctactatgaacacctttatgcacataaactagaaaacttagaaaaaaatgggtaaattcctggaaaatcaaaccctcctagctgaaatcaggaagaattgggtaccttgaacagaccaataacaagcagcaagattgaaatggtaattaaaaaataaccaacagcagaattctaccaatcattcaaagaagaattggtattgataccaatccttttgacactattccacaagatagagaaagaaggaacacttcctaattcattctataaagccagtatcaccctaataccataaccaggaaaggatataaccaaaaaagaaaactacagactgatatccttgatgaacgtacatgctaaaatccttaacaaaatactagctaactgaatccaacaacatatcaaaaagataatctgccatgatcaagtgggtttcataccacggatgcagggatggtttaacatacacaagtcaataaatgtgatacacgatataaacagaattaaaaacaaaagtcacatgatcatctcaatagatgcagaagaagcattcaacaaaatccagcatcactttatgattaaaattcccagcaaaataggcatacaagggacattccttaatgtaataaaagccatctatgactaacccacagccaacgtaacactgaatggggaaaagttgaaagcattccctctgagaagttgaaagcattcccgttgagaactggaacaagacaagcatgcccactctcaccactcctcttcaacatagtactggaagtcctagccagagcaatcagacaagagaaagaaataaagggcatccaaatcagtaaagaggaagtcaaactgccactgtttgctgatgatatgaccatttaccttaaaaaccctaaagacttctccagaaggctcctaggactgataaaataattcagcaaaatttccagatacaagattaatgtacacagataagtagctcttctatacaccaacagcgaccaagtggagaatcaaatcaagaactcaacccattttacaatagctgcaaaaaataataataaaatacttaggaatatacctaaccaaggaattgaaagacctctacaaggaaaactacaaaacaccactgaaagaaataatagacaacacaaacaaatggaaacatgttccatgctcatggatggatagaatcaatattgtgaaaatgaccatactgtcaaaagcaattacaaattcaatgcaatccctatcaaaataccatgaccattcttcacagaattggaaaaaacaattctaaaattcatatggaaccaaaaaaggggctgcatagccaaagcaagactaagcaaaaagaacaaatctggaggcatcacactacctgatttcaaactgtactataaggccatggtcaccaaaacagtgtggtactggtataaaaataggcacatagaccaatgaaacagaataaagaacccagaaataaacacaaatacttacagccaactgatcttcgacaaagcaaacaaaaacataaagtggggaaaggtcacccttttcaacaaatgatgctgggacaattggctagccacatgtaggagaatgaaactggattctcacttctcaccttctaaaaaatcaactcaggatggattaaggacttaaacctaagacccaaaactataaaaattctagaagataacattagaaaaacccttctagatattggcttaggcaaagatttcacgaccaagaacccaaaagcaaatacaataaaaacaaagataaacaactgggacccaactaaactaaagagcttttgcatggcaaaaggaacagtcagcagagtaaacagacaacccacagagtaggagaaaatcttcacaatctatacatctgacaaaggactaatatccagaatctacaacaaactcaaacaaatcagtaagaaaaaaaaaaaaacacaacaatctcatcaaaaagtgggccaaggacattactagacaattctcaaaagaagacatacaaatggccaacaaacatatgaaaaaatgctcaacatcactaatgatcagggaaatgcaaatcaaaaccacaaagcaataccaccttactcctgaaatggccataataaaaaaatacaaaagacagtggaggttggcatggatgtggtgatcagagaacacttctacactcctggtgggaacacaaactagtacagccgctgcaaaaaacagtgtggagctttcttagagaactaaaagtagaactaccatttgatccagcaatcccactactgggtatctacccagaggaaaagaattcattattcgaaaaagatacttgcacatgcatgtctatagcagcacaattcataattgcaaaattgtggaaccaacccaaatgcccatcaatcaacaagtagataaagaaactgtggtgtgtatatatatatatatatacacacacacatatatatatatatacacacacatatatatatatacacacatatatatatacgtatatatgtatatatatacatatatatgtgtgtgtgtgtgtgtatatatatatatatacacacacacacacacatacaatggaatactgcttagccataaaaaggaatgaattaacagcatttgcagtgacctggatgagattggagactattattttaagtgaagtaactcaggaatggaaaaccaaatatcgtatgttctcactgatatgtgggagctaagatatgaggacgcaaaagaataagaatgatacaatggactttgaggacttgtggggaagagtgagagaggggcaagggataaaagactacaaatatggttcagtgtatgtatactgcttgggtgatgggtgcaccaaaatctcacaaatcaccactgaagaacttactcaagtaaccaaataccacctgtaccccaataacttgtggacaatttttttaaatgactgaaaaaatacctaaatgttaattaggatgtagaaaaatagaaactttcatacatcactagtgggggtgtaaaattattccaatggtaccatagaaaactgtttagcaatttatgaaaatattaaatgtgtgtctgctatatttaaaaaaggtctctagttgctcaccttcatattttgtaactatttgccatgttatggtgcagtagcaaaccatctatggcacagtgcataggcccaactttgagtagcgctgtgcttaagtacctggctgtgcctcttaaccaaatgaagcatggctctactgcagtaagacctgctccctctcactggaatttctgggtttgagctggtcactgagctgtgtgtccagctgctgtagacagtgcagctctctcagggctgaatgtcccaggcatgtgggacattaccccagtacagcaagagatgaatttccagagtccagaaaggactctgatcgaaaacacctgctgtcctgggaagtagtaccatctctggaaagggtccagtaaaaaccagacaggtccttaaacataaaggaaacaagggtagccctggcttcctttctgtcttccacagactcaaaaacaaaaatacagaaaaggtacagtagccttggggtttgaccactattaattatgaggggcacgaaaatgggaagtgcttcggaagcaactgagatggtctctggggagcaatttgcccactcccatgtgaggccagtgagccacagcttaaggatcacatgtgtctgttagacttgggcagccctcagccaggacagaggcagcaaggcccagacccagctcccgactctagcattatttctccacagcttgacaggtgggtgcctgggcaagcatctgccccctctttttccttcccttttcttgtcttgtgctcattctcctcatgcatcctcaatggacgtcaagtgtaaatagaaggctccgactcccaggtcaggcggctgtcaggggttccctccttctctctgaaatgctcactgtccctgccaactctttattctgtacctgtcagagctggctccctccaatgtctctatggacagattccctcctcagtgaagagtgtcagtgacccaagaagtccctggaatcaggccgtctctcagagcagagacggtttcagctgggggtttttcctctccctttcaccagtccagcatttagcgtgaggaactatttatgcatgaggtgggcctgggtgatagttatggggaaaggggtgctgtggaaggattctaccagatacaggatgccagcgtcatccccagtgccacatcttgctacattcctactattatggcccccatactggtccagacagagcaagaccctgggaaggttgggcatcaggtagagttggcttttgaagtctccctcatgtcaagtggagatgtccagccagtgtgtgaggaggggtgatatgatttggcactgtgtcccaacccaaatctcatttccaattgtaatccccaagtgtcaagggagggacctgtgatctccgtgtgttgaggaaggaaagtgattggaccatggcggtggtttcccccaagctgttctcatgatagtgagtgtgttctcacaagatcgatggctttataagtgtttggaagttccttcttcatgcttctttctcctgccaccttgtgaagaaggtgcctgcttctgccatgattgcaaattttctgaggcctccccagccatgcggaacggtgggtcaattaaaattctttcctttacaattacccagtctcaggtagtattctttatagcagtgtgagaatggactaatacaagggaagaggcaggtcatttgttgacaccatgggagttgacaccatgggagttgtggtagagatttctgaggcaggctgtgtggatctgaggcgagagtctgagagaacacccagttagcaagagggagtagcaagaatttggaaaggaggctggagggagaccttagaggagtagagcggaaaccaggagaatgtagcacttcatcaggtcagagaggagaggatcaacagtgttgtgttgccaggagatcaaggaggctcaagcctgaggaagggagatggttggtgattaagatagatcccgagcacggtggccaggcatggctgtgcacactgcacacccccagggggagtcgtctacaccctcgtctgtgggatggtgacccctggagttgtgtagtgtataacttgtgtggctactggagacaccctgctcatgagaatcttatcagcctaggggtgaaggaagaagccccattatgagctgctgaagtgtgagcaggaggcatggtggagctggagcagtgagggtgatctgtgaaaggagtttagatgtgaaggaaagaaaaagatatagtggctggaaagcatatctgccttgagggaaaacaaccttattttacacttggaaatctgagcatgatttagccaaaagcaacaacagcaacaacagcaaccccactaaagtaggagagagaacagataagggagagcgaagggagagaggaatccatccattcagaaagcagtctttattgccagcctcctgagtgtcttctcatcgtgtgctggaatgtagctgtggagacaaaacagctcccgccctcacgaagcttatagttagtgaccagtgacactatagatagggagtgaagggtgggtggggcggcgttgggtttgtggggcagggcagacttctctgaggaggtgacctttgagctgagacctggatgatgagaaggagcgcaccctgtgaagaccatggggaggagcgtacctggcagaggcagtggctggtgcagcagttcccaaggtcaggcaggaagatcccagcctggctgggtcagagctgcagaaagggctgggtggtgagcctgggtcaggcagggcctctcaggctatgggaagatgtttccatgagagtaccgtgacatgtactcctctcttatggaggagaggtcacctacacatgtcactgtactctcatggaaaccggaacctattggcttgggatcctcttgagatctgggataatctcatggcctgggattctcttgagggtctcagtcacctccctatcctggcatagagtgaaataactgaggcttgaatgaaagtcttcctccaagtcagccatcagaaacatgccttatctgagtcaggaagagtttaaattcatggcttcgtaggaaggtctgtgagtcaggcccaagctcagggcgtttctacaggcccttacacatgctatgtatgtggggacaggggtggactgaggcatttcagtagtcctgagtcacctcacccacatagacaccagctgcactaaactttccaggttgatgaggttaactctgaagccctcctgccattatttctggatccctgaatttccctgcagtgttctttctctatccacactgttcgcctgctacatcttgctgctcaagcttcttcttggggtacccccttagctcagcttaaaaattacatcccttattttttagccattctctcatcctcataaaaatttctatctccttaatgcagacattagcaagaaagcaatctaattgaaaaaattcatgctaaggtgttggtatcaccatcacactcatgggggtatttgattgttgaaaaaagaaagatatgtgcccagattacagcatttactcaatgcattgaggacacacatgtttgccaagggatgggcgttagaaagataagagaaaggtttaggaatggtaagccttcccaaatctcctaaaaccttgtgcctaaggctaactttgtttccagatcccaaaagacagaaaagacagtcctccacatttgcaagccaagatcaaggtagcttgatggtctgaggacaggatagttacaaagcacagttagattcttaaggtgcctgcgtgcctaccattgggtcagccccaatctgaaaccagcttctccgattggggttaaaataacaccaaaacaaaacaaagcaaaacaaaaaaacaaaaaaataaacaaggatgaagcaacatatgttggaaacctacgtgtatgttattttatttactcttcatcacaatcccatgatcagattgtatattgtcccattttccagatgaaactgaggctcagaaatatttagtgattttcccagggtcatgcaaatatacttaaagcactgggattcaaaccaggcctgtctgactccaaagctccattcctcctcctgtgcctcagggttaaaactctatcctaaggcggtggcagctgtcccggccagggcattctgagagccacttgcagctcttccatttaccaggttgagatttacttcctgtctctgggcttcaattttctcatctagaaaactgggagacagacgaagttctttgaggttcccttgcaggcctaagcatcaccgtgttgggtgattcttcctttgataagtcagtgtacagctcatttgatgtgcaaatgtcaaaatgtcagcagtgccatgaacccttgagcattcggctccttagagagaagcctcttgaagggcggcaggaggtgggccaccttggaccggcaagtccacagaggcctggagagatgtggtgcacaggagagaggtagatcctccagctaaccctgggatttcccggggaatgggcatttgtgtacctccttgtggacagggcctgagcccatggcccgatgatcacctgagtttttacaaggtggttgagagtttgggtgtgtttttcctctctccttttgaaaaccaagaggtcagcgtgagtgtaattctgacacatgaaatctgctccttgtttggaaacacccttttcaaataaatcttgagatgggattaagagaacagttttggctcgttttcaggactgtcatctgttgaacatctcccagctcatttgaaggaagtgacagaagagagtgagatttcaaatcagggaaattggcgacaggctctgctcaaattggcctccccacctccagcgtgcagcccgcagaaaacaaaagctccggagtaggaaagtgacacagcgccacctcccggtagcctggccggccaaggcctctggcttaagcgggcctctggcctgccaaaatgcctggggagggaagagctgtgtctctgcactcataagatgggaacaggggggttctgggagctccaaacgtttcagttcacagtgtgtgcagtcgtgtgtcttgcgcatacacacatgcacatagacagccaatttgaacaccgaggattaacttgtcttaaaggggcaactctctcgtccatctacttttaggcagattttaaagacgatcatagtagttagcatatggactttggagcctggttgcctgggttcaaatctcagcttggcacttaatagctgtgcaaccttggccaacttacttaacctctctgtgtctgtttcatctcctacagaataaggataataagagtatcaacctcagaggatcactgcaagaattgagtgggatacatatgacgtgcttagcacagtttgtggcccatggtaagtgctcagtatgtattagctatttttggtattcaattaaatatagctcacacattttttttttcttctttacacccacctgttcggccatttctaactgcctgttggcttatacatcctatgcagatgtttctggttcaaggaagataatgctaaatccacagttttgctgaaataattgaccctacccaaacgcacaccctaaactgaatgaactacttggcagattttgagaaaaatcatccttgggtaactcccatgtattttttttgtttttgttttcgagcagcctggctgtgcagttggggcagttgatgcttcagagtaaacccaggaaggcttcatgggcctgtggatgatacatacagcactctcaaatgttgagcttcaactcatgaggcaatattagtcctggattttcctacatttgtctgtagattgctccagggacactggcagatgaggaaagggtttcatttcaagccttcctgctacatttgagccagaaggtctctgggaagctccttcatggggccagacttgggatgtgcatccatcttgatggaaagttctcccaacctagagaaaagatggtgaggcaacaggctgccaaggtcagaggctggtctttcccaaagtcaaccgtaaatcaaagcctccaaggtgaccgaccacgtgtcacagacaccagctctgcagtctctgagcgggtggcacagggcttgatgacaggaggccaccccttccccagcccatctgctgctagggaagaccagcgtgtgggctgttcattgccaccaaggaggttttcctgctgtttactgaggtttaactctccttgtaaaggagggcctggcccaaacatctgtttcatcaaaggggttggagtcttggagacacaaaagcttctctcagtggctccattctatggcctttatcgctcccagagtcgtcctattaatatgctgaaacagccatgactttgccactatgaacgtgtctagggagcacagccaggtttcagggtgaggaaggagagaaagggagagtcctttgaatcccctcagactttacacttggcttcctcttatgggtaagacttaaccatgactcacctgttttagaatgttttgttagccaatccctgatttgcttgaaacctccaaagtctcaagaaaatagcctcaagggaacttggagctaagtcgcaatgtctcaggcctaataaataaactgcatatgaggacagcacatgatcgaaagagcaaatgccagaccgggaatcttcaggtccagcacttggaagtcactgggatttttgcagaaaaccatgaagcattaacgttttaagtttaaaggattaaatagataatttagggctacatctgactgtggagccctggagtctcctgctatttattggctatttaactctgcagtagttacttcacgtctctgaaactccatttcctcatctgtcaaagggacggaaaatactggggtgaggacttaatgacaaataatatgttttactccctctagtgcttggcacgtagacactcaaacaatggtaaccaagtaacaaaagtttaagagaaatgtgtcagagaagaagctaacttgagaaatgcttttccattgaaattattattatttaaaaagttttgtttttgtaaattgggaaaagagtgccacagcttgatgatagtggagtggcagacgtgttgtatggcccggctagggcaggcggccctgatatatgcagcggtgtggcttcctgtgctaggttagggttctcaaccttctctacctatgacaacacacctatccagtggcatgaggttgcccaacccactctcctcattgatgacaggttcgaatcctagctcgatcactagctttgcattatcttgggcaagtaaatgagtgatatgaatagtacctaccttccaggttttggggggtgggtgggtaactgtgattatgtagataaagcactgaggacagtcttgagcacaaaataaatgctcaatccaaaagaaaaaaatgcgttcatgatttctgtatgattttcagccccagctataaccccgtctttttcactcagggaagcaatttggaaaataacactgtgatagggatactcttgaatctgctcaaaaattgctaaaactcattcacacatagatttaatcattatcagtaacaaattatttgtgaatgacttcataactgttgtagatcacaagtcctcaaacgcaaatgggtgccatacttttctccaggctgcgtgaaatctgcatttgcttcaggtggctgctgtaacaaattaccaccaacttgttggcttaagccaatacgattgtattatcttacagttctgaagctcagaagtcctaaatggatgccagtgggctaaaatcaaggtgtcggccgggctatgctttttctgcaggctctaggggagaattgtttgcttgccttttccagattttaaaggctacctccttccttggcttgtggccacattctgtcttcaaagccagcaatggtcagatgagtctttactcctatgccatctctctgactcttctccacttaagatgccttgtgattacactgagttcaccccaataatccaggataattgccctattttaagatcaggtgattagcaaccttaattccatttgcagtttctacttgccatatgatacaacagattcataggttgtaggaattaggattgtggacatctttggggttggcagctgggggcggcagtgggtatgggaggggcatattttggcaaccacatgggataactttgaatctgccaaaattacttaaaattcattcacacatattgttgctttaatcatcagtaacaaatacagtgaataactccacaatcaatattgataagagggcctcaaatacggtgggggccatacttttctctaggctacatgaaatgtgaaaagataagataatatggcaatttttaactgaaaataaacttactccatttaaaggactattcttttggtattaaaatgttggcagcagatgatagttggcttttaaaattgttgacgtacttgtcaaatataaaagttagtaagtcagtcaagacccaaaggctttctgggaaggaggggatgttgctgttttgtgcaatcaagggcagcagccattacgaccttccaggaggcaggcctccagccgacagtgtgcagggccacaggactctcagagcctttcccttctccatacttttccttctccattcttcccagggtttagagagcttggagccaaaggactgggatctgaacccctcctctgacatgggacaattcactcctcagttttcatccatagaatcagaatgacagaaaacccagcctgctcttctcacaggatggcaaggagaaccaaactagaagagtgcagtaaagtgtaaagtgctgtacaaatggggatggttgtttttatagctgaaacttacactcttagtttctggatctttctataatgtttattgagtgggtgagagaaaatgatgaaggccccagggggtacaattaagcctttagggaatagcagttagaaaaatgccattttcctccctaaaaacgaaaacaaacaaatctttagggtttttttttaaatggtaaaatacacataacataaatttgtcatcttacgcattgttaggtgtacagttcagcagtgttaagtacattcatattgctgtgcaacccatctccaggacatttccatcttgctagaagggaattctgtgcccatggacaacaactccccattttccactgtcctcagaccctggcaaccatcactctgctttctgtgtctatgaatttgactaagtacctcaaataagtggaatcacgcaggatttgtctttcagtgattggcttatttcacttagtgtaatgtcctcaaggttcattcatatagttagtctgtgtcagaattcccttcctttttaacactgaataatattccactgtatgtatatgccacattttgtttatgcattcatctgtccacgaacaacttgggtggattccacttttccgccattgtgaatgctgctgctatgagtgtaggtatacaaatatcttttcaagaccctgctttcaattcttttcggtatgtacccagtagtgcaattgctggatcatacggtaatcatatttttaatgtttcaagaaaccgccatactgttttccatagtggctgtactatttcacatttccaccaacagtgtacgaggtttctaacttttctatgtccttaccaacacttgtttgttttttttgacagtagccatcccaatgggtgtgagatagtcctaattttacttttttaatcacaaaagtaatactagctcatagtaaaaatgttgaataggtgcagaaaggcaaagaaacaaaattcacctacttgctccttacttcctcttacttctcagagatagccacaattgtattgatgtctacctatttctatagcatacatgccattccatacttttaaattttcacttaataatctatcttggacgtctttttatattaatccctatagattgacctcattccttttcacaaccacagaatattccaatgtatcaatggactataatttaaacaacttctcaacttcctattagtggacacttagttgattttcagaactttaaaaaaaaaaaaacagcaatgagagaccatgtagcagcaatgatgagtacagagcatgaagcccaactgttttggttcaaattccaactctgctacctagcagccctcgaatgttgggcaagtgattaaccctctctatgcttcagttttctcatctctaaaatggggatgattataacaactacctcttaaggttactgcgagggttaaatgaatcaatgtatgtaaagctcctgaagcagaaggtgtggtgtgcatcagctgttacttggttttaatcaacctccttggacatatatatctttgtgcatttttctgagtatttattttattttattttttctttaacttttactttaagttcaggggtacaagtgcaggacttgcagcgttttttacataggtaaatgtgttctgagtatttatcgtaggacaaattgttagaagtcaaatcgctgggccaaagggtataatttttttctttccacatagactttttttttttttgagcaaaatggtcattttctgggaggctaaaattgtacaacctgtggtgtgacaaatttgaatgccaaaaagtagcaaattgtcctccaagagggttgcaccaacacactaagatggccttaagacccccaggctctgtcacttcatggtcctcatcactttactcctgtttctgagtcaagtctgtcttctcttccctgaacaatggccttgtccattacccctttcagcccaaagggaagaaattggcagggagggatatgccaagccatgccctggggccctgttgtgattgtgggcctgggccaggcacttcctactttgttggtaaaagctgctctgtctgggccccagctctatcgctatgtccttccacatgcacatccacaaccatagcgagaagcccgggccccccacccagtacctcttccttctcttgagccttagtctgatgtccctgtggccccatcataggactgaactaaatataatgatgcattaaagcctaccaagccactctgaaaggggatctcattttctcaggccctgttggtctagtggttctctctagaaatatatcttcattgtatttgttgattccaaaagcagtgcatactccttgtaaaacaaatcaagcaatacagaggaatgaatcaaggtcaaagcaaaagtttcccattatctcatgttcccagaaataatcactgttagtagtttgttaaatattctcccagactttttaaaaacatgcatatttaaaaatgcaattatattacatacattctataaccctcttttttcactcaacaatggacatctttccatgtcaatatgtgaatctattttatctttttaaatagttgcatgatatcctggaagtctctttttcttggccttggtttcctaactttcaaagggttcattcccctttgaggaggtgtgtggcatggtagaaaatgtatcagactgggagttggaagatggattcttgactaaacttactgtgtgcccttgagcaagtaacttgctttctctctgttagaaatggaacaggattatacatgtgagagtacaaacctactttaaaatacacagatgcgcctgtaatctcagcactttgggaggccgaggtgggaggatcacttgaggccaggagttcgagaccagcctggccaacatggtgaaaccccatctctactaaaaatacaaaaattacccgggcgtggtggtgggcgcctgtaatcccagctactcaggaggctgagacaggagaatcacttgaacccaggaagcagaggttgcagtgagccgagatcgcgccactacattccagtctgggtgacagagtgagactccatctcaaaaaacaaacaaacaaacaaaaccagatgtattattctcataagaccaaaattaagtctgggttagatgaggacttaacacaagatggtctagcacttgtatggtcatcatggcttttggtgatcgccaggggagagctgcttctgtttttcccaacaatagaactgtctgaagaccatggggaacccagacccacacttgctgggtgtcgcactagaagaagagcagaacttatctgccttgcagccttggttctcagggaagggtgctgacctgcccaaggtcaaagcaggtccagaaaggccacagtcctggctcggtgctctcccagctcctgcatgtagcctgtcctgtagaaaagagaggatagatctggccagagctggggctgtgggcaaagaggactggatgctctcttggcaacatcatccaaggctcaaggaccaggtaccctccagggggagttgggggagggtgctggtccagagatttggaatctggtacttttctgcctctaactttggtcaagtcacagtggactttacagttcttatctataaaatgaaggggttgggaggtatgatatctaagaactttcattcattggttcaaccaatattcaaccaactgcctgccactagttaggcactgttcagcccttgaagatgaaataatttttaaaagtgaacatttacatagcatttactatgccagacactgccttaagaatttatacataatataaatataatataaaagatattataattattatactatgattatatcaatatattataattataatattatataatatattataatataattatattattataattattttataatataatcataattataatatatacataaatgttatattatatatctaatcatttaacccttaatcttttatgactctataaggtaggtactattagtattaccatgttgtagatgaggacactgagacagagaagtcaagttccttgtctaagtttacagagtgaataaggagaggagccaggattggaacccagcaccctagctcacggctacactctcaacctctagggtcctcaccctcatgagactcacagcctagcgataatgctcctcccatttattgaacacctacatgttcatctataccaagcatgttacactccttgtttcatttaattcttatagcaactccatgagggagagagtaataccccattatataaatgagaaaattaaggctccaaaaggccacaatgcagcttataagtgacaaggatggcacttgatcccaggtctgtttaactccagagtctgggctgtgaaacactgtgctgttctgttctctaatccaaccttttgacatagctgaaactgagacaaggcctgggggtctgagtctgggcagccatgggctgcctggtcgtccctgctggcctaggtggattttcctctggggcctgggttctctcactcgctggctctggggtcctggggtccgcaggagacggagagcaggctcccctttcttagcatcccaggctatctccgggatgaactcctgctgtagcagcctcaagtggacatggagaagaggccactcccatgctgtggcttcaaagcctctcccatgggctattgccgaacattcctctgttgcttcttataagtcaccaagcaaccaccccacccagaagagttgcacttcgtctccagtgtaaaaggcctccttagacctcttcctgagatgagagcaagttccggggctcaggccctaagagtcctgcatagactcccagggaaaggggagtcttttctcgaacaaggagctgtacgggtgggcacaagttctgatcccactgagggtttcagtaaatgtttggatgaacatagggatggataaattatctaatggactaatgaatgaatgaatcaaaatgaactcagaaatgaaaggatgcacaaagaaatgaatccatcagcctgtgaaggaatgaataagccccagggcggccctgtggcctcagcctcagtctgggtccccaggtgagcacttgagtgaagggaggaagtttcagaacaggacaaaattgcagcatccataactctcccatctgagatgccaagaggaggagcccctggcatctcctaggcattccccgtctggagtcctctggcaaaagtgtccctcacctgccctctctgccatgaggactggcttagagggaagctcagagctccctcccatcggtgcccagtggaaggagagcggcaccagcccggtgtgaaggaagggtcctcacccactcccttccccctctgggaagccacacagaactccaagttaattaaagcctccactctgagaagaagggaatgttccatttggtaaatttagaaacagctggttagttttacccattacttttgtgctaacatcagtggagctcattcaactctgtctttttatgaagctgtccttccaatgctacctgatagctactaattgctgcaactacatttctgaattgcaaattttctgcactgataaaaactttgattgcctgtcagctacacataaggaaaagatcagcagtgctaaatgaggggttccacgcttggataataatgcctaatgaattattcaggaaagaatgcttgaatgaagcaaacaatttgaagggttactagcagccgtaacagttcaacaggcaaaagaacaaaagtatcatcctgaacattacactaatgattaaaaaatgtgtattaattctagatttggagaaaaaagaaatgccaatctgattttaaaggttaatcattattttctcagtaatgctctgatctctggtggggagggtggtgatgaagggggagaaccctttaccaatattttgggatgtataatattatgacataatagagtcatataatttcacacacgtcatttaaaaattgtaaatttcaaatttcattggaaaagataacgcaaaaaactaacagcgtgggagcagaatgctcacttgagagaactttgctgagtgcaggctgaaccagcgccaaggaccccctccctgaagcgaggggccctgcagaaatggcaaaatgaaataagatatatatgtgattaaacatatgcaaatacatatcataattagtgactctttctggcggaatctgaatgtgttttacatattttgcaagtacgctgttgatgcaaatgaaaaattctttcaaaagcttctgcctattgggtctgaaaccctagaaaacaaaccaataaatcaggtttcagcttctgtccgatactgacacatttgctgctttcataaaaaatatatttctaccacccaaagtgctaatttgttttgacagatgctgtggagttgccaaatatgagggggtggggggaatcctggaaactgtaatgcaaaatagtataattaaagatgttaaaaaatacgaatgtaactactgtgatattacgatgtaactgaatatttaaaaatagctcttcagggttgtgcttaaaaaatctccaggcaatcaagatcacctggagagtatctaagaaagctgtggtgtacgtgtggaactggaggaattttaagagtagttttaaattatggaatatgcagccgaccacttaacagcctcaatgagatttttttttccagcttaaaagcccatggtattagacatcaattagtaattttattataaagatgttcaatgtcaagataacactcttcgttcctggcattgatgctgcacagtggcttggaagtctgacttcaggagaagagctgaccatctgccagagcctgcacactcacagatgactaatgttttccccggaggactgtggctccctgcgtttctgttgctgtcttttcgatatcaaagcaaggctgataaacacattcaagtcacaattaaaaaacattttcgctgaccagttgccaccgatgatatcatcggacagcttcggtcactgttgtaacaacgcatttcatggtgttgatgtgcaggcaagatgaagtttccctttatttggtccttaacctagctctgcaattctttaacgacatttccaggcacttggagtcttgcatggaaatgccatttggtctaaatcaggtagagagacacagggagaatgctgggatttttcaggccaaggccccatccaggaggatccatctaagctgggactcactgagggaggtactttgtagggggttcagaccaatgccagtcaatgagctttttgactgttgctaccctgcgttgtcactaaattcaacctagaatgaaaaacagaatgctatacatttttctggatatgaaaaaatcagattatccagctgtgacgcctagaagctttatagaaaagtcatagacacttagtttaaagcaagagtcatctaactggacctcaggatatttttgcatgatgaatggtgggaggagaaattggttgatcggagcatctactaccacttgttaatctccatgctaaacactgttcaggtattttatgcaactacacatgccactccacaacaaactaggaggtatatagtatcattttctctattttacagaagaaaaagttgatgcctagagaagttatttacccaaagtcacacaatggtagcactaggatttgagcccgcatatgatgtcaagacttacgcacttaatcaatcagcactacacctttagggtcacagaggaggctgttagagctggaggaagactcagaggtcatccatttccttattttgcaggagaaactagggctcagagatgtggaaaggggagcccacgtcatgttgctagctggtgttcgggcttaactggagcatcatgggtatgaattctacttggtcttacctatgagccacctcaggatttcctgggctttgtccagccttgcctgagagttctacacttccctccgtggtctcagcattttcagactctgagagtcctgggacaccgcctgggtcttgtatcaacctcccacacttcacggccatggagttcttagaacgctatctaccacagatatcctgggcagagtacgtccaggactcatgggagaatgtgccttattgttggctctctgaaggggaaatctccatgtttcgcttcagaacagagtcaatgtgccaaccaggaaagagagggtttgggtttgataagacctgaagaaaacttgttctgcaatggggtggtcagcagagatgggaagttgcctggtgtagacagagccctgggttttgatttggagtcttggtcctgccacaaagacagtgtgatgaaggcaagtcactttgcttctctgagctctagctttcctctgtaaaatgaagaggccgaaggctgaaccctgcccagtcttctataccaatgtattcgagatcatttgggtctggaagcctattaagacccaggtctttcaggactttctcagcagaagattctggttttggtttccattcatgatacttagaggcagtcttcttctcaattagaaattccaggaggaaaagcaaaatgtgaccttctccagagcctgagaagtaccttctgcattcctttttttttctttttttttagtatttattgatcattcttgggtgtttctcgcagagggggatttggcagggtcacaggacaatagtggagggaaggtcagcagataaacaagtgaacaaaggtctctggttttcctaggcagaggacccagcggccttccgcagtgtttgtgtccctgggtacttgagattagggagtggtgatgactcttaacgagcatgctgccttcaagcatctgtttaagaaagcacatcttgcaccacccttaatccatttaaccctgagtggacacagcacatgtttcagagagcagggggttgggggtaaggttatagattaacagcatcccaaggcagaagaatttttcttagtacagaacaaaatggagtctcccatgtctacttctttctacacagacacagcaacaatctgatttctctatcttttccccacatttcccccttttctattcgacaaaactgccatcgtcatcatggcctgttctcaatgagctgttgggtacacctcccagacagggtggcggccaggcagagacgctcctcacttcccagacggggtggcggccgggcagaggctgcaatctcggcactttgggaggccaaggcaggcggctgggaggtggaggttgtagcgagccaagatcacaccactgcactccagcctgggcaacattgagcactgagtgaacgagactccatccacaatcccggcacctcgggaggccgaggctggcagatcactcgcggttaggagctggagaccagccgggccaacacagcgaaaccccgtctccaccaaaaaaatacgaaaaccagtcaggcgtggcggcgtgcgcccgcaatcccaggcactcggcaggctgaggcaggagaatcaggcagggaggttgcagtgagccgagatggcggcagtacagtccagcttctgctgcgcatcagagggagacgtggaaagagagggagagggagaccgtggggagacgggaaagggggagggggagggggagcgggagggggagggggagaggtagagggagagcccttctgcattccttaagagctttcaagtcattcttgggttcagtccttatatctgctgggaataattaatctaggactattcgcttcagagccccgagctgtaacatgggatctcaggagcaactgaagcactcagcactttctgaggaaaattacaccagatgagacactaaatctctaaaattcaacttagaaatgtgctttattctcaggagttttgtcgccaagtgctggtaatggcaaggaagtggggggtgttgagaagaagtggggagaaacagggacaaaaagaagccaaaacagtcaagaaacaggagacaaaggaaactcaggccaaggcacagctgggtgtttcctttcttctaatttctgtcctctttgtaaatgtctgattgcatcaaactgtcatcaatagtagtcaacattgatcacatttccactacatgtccagcatgtgctgaacactctacatatattatttcatttaatacaacaacccattgaggtaggtaacgctattaatctccattctacaactgtgggacagaaggacagagatgctgataaacttgccccagtacacttcgttagcaagtggcagaggcagaggcgggagttaaaccaggcagtctggctttagaacccagtgtaaccacgaggctctcccaccttcaataaagtgacacccacatagattactttgtcaggtgtagaatccctcacatttcacacacacactcagtaagctctcaactgtgttccaggcctgaccacgactaggctcagagaagcaaagggcatttccctttgaatgacgtaacagaatttgtgtcattaaaaagctgggtcattaatcagatttgtgcttggatggattggactcaccagtgcaagtcagctgctggatttctatggtttctttgctctatggaagcaaatgcttcttctcttcaggaatgaagagctccttaaaagaatgattttttaaaagctcattaatcaaggagcacggttcaactatagaatatttccattgctctaaccgcccagtaccatcttgtcctctctagctccagatctgcatcctgggaagccaggaggtattggtggggtgggcagctgcctgttaaaatgctgaattgattgccacccatccagcccatttcagcgtgtagacagatttgaacctaagctaggcaagtgaattaaccctgtgtcctcttggcccctcggccctctaggcaaattgtgaatcaaatggaatctccctcgtgctaaggggctgcagagctgtcattccatatgctttgctcagggtaaggggtctctggagagaagttaatgagcaggggctcccagggcagggagagtcccattactgagtttcctcagcaatatggccaccgtggaagcaatgcatgcactggcatgtttctgagaaaagaacaagatttgttatttgtttgtgtaatttctaagcacaccggtgaatagcaggagactgtcaacacccagtggccactttcctgagaagctgagtgagcccttctgctgttgagtgcacaagggggattttctgagtggaaatctttcctcattactgcgctgccacaaacaaatgaacattggaagagttcatgcacagataagggacatgtctagggaactgtggagaactcattacatcccttctgatggtaaccctataagaagaaggagaaaagggaaacaaacaaacaaacaaacaaaaaactactttcctgccaaagcaacattcccatcaccccaaaagtttgttgtgtctctttgcaatgaatccccattcccccaaccccagcttctgatccactgatcaattttctgtccctaaagttttgtctctcctagaatgtcgtacctatggaattctgtctcgttgagttgtgagctttccttatagattctggattcaagccctttatcagttatgttttgtgagggcttctttcagtaaaaataccaaaaatatttcaaggacttgcaaataatcctttgtatagtactaaagcattctttgacacaaaaaatgtacagtaacaaaaaattgttctttttaaatcaatgccttaaataaactaggagtgtattaattacaacataatctaatgtatatatttttaaatcatacatggcatttacttgaataggaagttttctttcagacctcttttgggaagatgataaaatacaatgatccttttccccctgcaagttgtcaaataaacacacatataaaatatttgcattcaatttcagaaggttcatagatgcctaaaattcactataaattacctagggatagctccatggccctaagatgaagcaagactaattgattcggtccatagacaaacgtaatgtacatgttggttcaggcatccctgcaacagctctagggtgccccagaggctcagagtccacaactgggaacccagcatgggtggcctctgagctcaaaaaaatctacagttctcacttcactaggacaaggacattcagatacttaaaatgacacatttgcccagtgctgagaaaaaaaaaaaaatccttgggaaaatcagggaaacttattatgcatgctctgatattaaaaaggacagagtgggaaatatccttgcctgggattggtgaatccaagcttctcttttcaaccctatctgttcatgttttaggagctgagtctgtgtctccaggtgaggtgattggatctggttctgagtcagctggtccaagcttgccttttttccatgggcctcattgcacacttctctagtgcttcccatgaacacacttaattggccgtgtgtcagctcaattgctgagctgatctaagtcatgatgaatctttcctgctctttgcccctggccacagcttgccacgtaattctgtatcatcagcactcaccatgaatttacatttgttcttttttttctgggtcatttataaagctggaggcagaaagcgcccaacatattgatttggaggaattgtgttttagcctttccactttcctgttgaaaattaatagcaaaagcacacatatatttgtgaaatttgtggatagaaaaggggtcactgtcaagagatactttggggagagatttggtgacggatggggaagctgctgagagacaaagataggggtccctgacgattactggttgaaaggttgcaggaaaattccatcaactgtgaagatgggagtcaggtggagagagaaatagatcatgagtccatttttaaaaatgttgaattttgagaagttggcagagagatccaggagggaattggataaagaaatctgcagctctgaaatgaggtctgggctggagacagaaatttgggagtcattgacatgtagccctgagactggaggagcttgtcaacggttttgtagatggtgcttcaggttatagacaatatgttgtcttcttccttcagagcaggccacagaattgactgagatgtgtaactttcatgtccccccatgagcaaacagcatgtttctactctgtgatgtgtatgttagggggcatgtatatctgtatttcttttttattctctccaaaagaaatttcattatgcaaaacattatcaggcaatgcagctcgtaataaagatgttggagaactgaaaaagagagcttacatgcacccctaatagcaaaactctccacacatttccagcagatgtatgtgtccttccgtggtcaccttctctcccaccatcacctgtgtttttctccactgccacccttccaccgaaaaagcttagttgtgcctttattgttctagacagttcagctctggccactaatttgcgtattcctgtcagtaagagaaacctcctgcagttaaccaggcccacctcctcaaaagggagtatgacagcaatagcattaatgtggcatacgtcttaggggagctcccccaacctcgactttagtatgaggtgcagggtgggattacaaggaaggtttctcaaccttggcactattgacatttgggtctggataattctttgttgttggagagggggaaagtgctgtgcattacaggatgattaacagcatctctggtccctacccgctacatccctctagcacactttcaccccataccccgccttcagttgtgatttctcaacttcttggaataaatccccaactctctcattcacaaattttgtgactctggacaaatgatctagcctccatgtgcctcggttttctcatctagaaagtaggggtaatcataatgcctacttcatagcactctagtgaaaattaaatgatttaatacttctgaggggccaggtgccatagctcacacctgtaatcccagcactttcagagggtgagtggggggtggattgcttgagtccatgagtttgagaccagcctgggcaacatggtgaaaccccatctctactaaaaatacgaaacagtagctgggcatggtggtgtgcacctgaagctccagctacttgggaggctgggcaaggaggattgcttgggcctgggagttcaagactgcagtgagccatgattgcaccactgcactctaccctgggagacagaacgagaccctgtctcaaaacaaaacaaaacaaaacaaaaaagcctgtgagggcctgcatataaaaagtactcagtaaaggttacctcttattattcccaaggacttatcaaattattcctcctgataggaataattctagataggattctagataggaataattccagatagaattttctacatagaattctccccgataggtgcagcaaaccaccacggcacatgtatacctaggcaacaaacctgcacgttctgcacacgtatctaagaacttaaagtaaaataaaatttaaaagaatgttcaaaggagatgatcagaaatgagtctcctatatcaaaaagtgaacagtgacaaccaaattaaattagtccaggaggaaaaaaaaaaaaaaaaggaactctcctcaagaggagctctggtgcatacaatttttttttccaatttgacttaataattttattctgaacctcagaataagtaaattcaactcctgttttcaaaacaggatttgagtgttaatccagttccgtgaacaaagatcaattactttttattttttatttatttagttatttttaagtatatgtaggtagtaaaaacctaatgtttgacatcaggttgtgcccttgactctaatcctctagcctacctaagggtgagagcttgtgcttaaataaagcagcttgaacacacagcctatatgcaaaggaaaactgggcatcctcctcctcaccccaggaatgtgtgtgtgcagttgtgtttctactggagaactttgctccaattctcccactaaattcttgatcttcctctgacctggcagcttcacctgctccttgagccctgcctcccacaatgagcgatagttctttcctttgatgtccccaacagggggttgtgtgggggagagtttttaccggtaattcagcaggagtgaatggcgaaccactaaagatgaacattacaacgtagttaagccttgttttttttttgttttttttttttttttttttttttttgaggcagagtctccctctgttgcccaggctgcagtgcagtggcacaatctcggcttactacaacctccgcctcctgggttcaagtgattctcctgcctcaacttctcaagtagctgggactacgggcatgtgccaccacgcctggctaatttttgtatttttagtagagacgggtttcaccatattggccaggctggtctcgaactcctgaccttgtgacctgcctgcctgggcctctcaaagccctgggattacaagtgtgagccactgtgcccagcctagttaagtcttttagcagtacttatccccaagaacttctccctggctatctcctctctcaggtcccaccttctttcatctttcagaacccaaccctctgacccttctcatctctcccagcttttctttgttcctgggctcaccacctgcctcctcaaaattcatctttctttactctgcagagcaatttggttccatttgtttcactcctgtgccacagggaggaaccctaagaaatatccttttacaaaatggcacctcaaggaacttgaattttaagagacagttctgattcctcaaccagcttttgagaattttttcctgcatatgcttatgtatcttcatataatattatagaacacacagccccatatctcaccaccattcttttataacagggattgttgccatttttgtagattgctttttagtattttgttttctttaaaaaatcaactttattgagataaaattttcatacaataaatgcattcattttaagtgtgcagtttggtgagttttgacagctgtatatacccatgaagacatgacaacaatcaaggtatagaaaatttgcattaccccccagaagatgcctagtgcctccatatggcaccccagtccccagacaattacagatctgctttctgtaactacagattaattttgcccatcctataattttttttttttttttggcagaatctcgccctgtcgcccaggctggagtgcagtggcgcgacctcggctcactgcaacctccgcctcctgggttcaagcgattctcctgcctcagcctcccgagtagctgggactacaggcacgtgccaccacacccggctaatttttgtatttttagtagagatgggatttcaccatgttggtcaggctggtctcgaattcctggcttcctgtgatctgcccttctcggcttcccaaagtgctgggattccaggcgtgagccaccgtgcccagccctagaattttatataatcaaatcatctagtatgaactcttttgtgtctagcttcttatagtcagcatgacctttctgagagtcatccatgttgtgtgtaccagtaggtcttcctttattggtaagtagtttccactgagtggatatataaaaattgatctgtccattcacctgccaagcaacattttctggcctttttttccacatgcatatttgtatttaatcattgtatgaattaatgtaattattatatagagagaatttggaaagtaaaaacaaagcagaaagaagcagagaggagaacacaacctaatttttcaatcagtggcaaacatgtttgacactttgacatatttccttctcacactgttttctttttcaattttgcacatgtttaagttaatgttctgcatattacttatataccgcttctgtctcttaagttttatatcataagcattttcctaaaagctgttaaaaagaatggagtagatggtgctgatgtagaaatgttgtcaagatacagtgctaagttaaactgctgaacagtatattaagtgtgatcacatttgtaaggggacaagcagtggatgtttgtgagagggaaagtgagtagctgagtcagacagttaacctgaagctggactgtggaaggtctccacagtcatagtaaggattttggatttatttggaataaaatggggagctattagagggttttgaggagagaagtgatatgacatgacatgtgttttaaaaggctgtctctggacaatgttgagaaaagactattgggcaacatggatggagggaggctaggttggcagctattgaaataacccaagtgaaaggtaatggcggtggagaggatgggagatggtgagattctggatgtattttaaaggcatatcccatagactagatatgatgtgtgagagaatgataaaagtcagagattatgctaatagttttgaactgggcaactgaatggataaagttgccatttgctaagttagagaagactaggaagtacagtgtggggagggagagatggggagcttggtttagatgtgttcagtttaagaaagtttttatacatccaagtagaggtggtggttgagcagctggatatatgaatttggagctctggggagtgaagcaggatgaaaatataatgtggaattcatcagcatataaataatatttaaagaccatagattggatgcaattaccaaggtaaatgagtttagataaagaagagaagagatccaagaacaaagctctggacattccaccattatgaggaaagagacatgaaaataaagcatcaaagggaaatgagaaggagcagccagtgaagaagaaagagaacaaggagagtgtgatgtcctgaagaccaagcgggaaaggtgtttgaaggaggaaagaggggccaactatattaaaacgaagttgttagcaacttaagttgaagactgagaattggtgactggatttagcaacatggcggtcttgatgatggtcacagcagcaattatggaggaatggtggggcagaagcctgggtggagagggatcaggagagaatgggaggtgagagcttagatgagaacaaaaaactttgttaaaagtctgtgcgatggattttttttcttacaagaaaagatgattggaactaggtttactcagttttgaaagggaagctgtgttagtcagttctggctgctataaaaatgtaccatagacagggtggcttagaaacaacagaagtttatttctcacagttctagagactacaggtctgagaccagggtgccagcattgttgggttctggtgagggcccttttctgagttgcacactaccaacttcttgttgtatcctcatgcggaagacaaagagagagagagttagctctctggcctcttcttctaggggcactaatcccactcaagagggatccaccctcatgacctaatcacctctcaaaggccttatctccaaataccatcacattggggttagagtttcaacatatgaatctggggggacaaaaacattcagtctgctgcagaagttagtatgacaactagacataccattcctcaagaggaaatagacaaattctagaaggaaaaagtaagaaataccagaatggatgggagtcagaagctcagcaatcccagatgcactctatctaattcattgtatgattttatcaagatttgatctctctagacctgttcttgcatctgtaaaatgaacgttttgaactagaaaacttctgaaatcattacataatttaaaatactatgacatcctctaagtatttacagatcttttacacaaagcattgcgaatggtttttcccccctccctctggctgttaatagctttctccacaggaccctaactctattcttgacccttccaaacccgcagatgactttgtcatcttttctaccaagaaggaaggtcatgacagaggaacattctttaactgcctttccttcaactcgcaaattcctcatgcttcaggagaaaaagtttctcttcctttccatctgtgcactcatcccatcacttcccatccctctatacaggttagaaatagagggggagtgaatgaacttgcttttagtccttggtagggaggggttattatacccattcttcagacagcaaaactgaggctcagagagtataaaataatgctgagatttacaccagtgaaaagggagggtgtggggctgtgacccaggtctgcctgactcctcagctcttctgtctcaccacagtctccattgaatggaatgcatccataaatgaatggctcattcttcatttttttctgtgcttttttttttccaaagccttatcgtctgtgtgctggtgttattgtttatgttgacctggctgcaggggcctcttggcaatatgcccacctgaaagtctgtttacctgctaactattgtaattttttaaaactcttggcttatatagggctcttttcaatcatggactcggaccttttaaatcctaatgccacctatgcaaaagaattcactagtatgttacctgttaagtgcagttcaaaaatatgcaaagctaaatatgttcaggggcatgtctgcagtaaaactgtaaagaaaaggaagaatgagtctgtaagttagcaattgccacaaacatattgtataaggaattgcttaaaacctagtgtcttaaagccacagtcatgtattctcacggagttggggcctggccaggggttggctgatctaggctggcttggctggggcaactcagccccactccacttgtctttcatcctcttccttgagtagcatactagtccagccatgttctttttgtggtgatggcaaaggtgcaaaaaagcaaatggaatcatggaaagattattgaggcctgggctcagaacagacgtatcatttctacttccttctattggccaaacccaaagatatggggagatgtgccttctccacagtgggaggtctctgtagagttacataggaaaaggtgtggatacagtaaagggtgaagaattggggctggcaatataatctgccacaataacaaaacacaaaattcaggatagtgtttactggtgggccgggggacaggaggtttggaatcagggaaaaatgcccaaagggctgcaatgaatctgttaatgttgtggttctgaagccaggttgtaagtacatggctgtttattttcttgttctttatagcttatataatctgtgtatgaaatattgtttagaatttttaaaaagttactggaatcagataaatgaatagtagaagttgcaactttttgacagtctcgcattctatattatttcagcttcattgtttaaatgtgtgtttctctttactaatttccaattttctaattttgttgactctcacttgccaatacaaatagtggtttggttgtctgacatctggacattaatatcatctacatgcatatttataatcttagtatgctgctcacactttaaaaaaacccagactttacattttaaccgagttcattttctttagttgctctcaaagtaaactcatctaaaaccataaattgttgtcctggcagttattagtctggattgattaggtttgatctgtgggttaatttcacatgtaatcatattatagttagtcacacctagtggctctattaattcagatgtatttgcacttccttacctattaattacaaccacctctgaagactgattggttctcagctaccaacaaaaagcaatccccatatatcagagaacaaattactgcctctgaaactaggagaacttggttggcttggaggctctgtaggaatattattgatgacatctttattttcttccttccttgaagatgaatggtgtacctgctaaatgaaccagcaatatcaaggccaggtctacagtctggcagaatttgtttggactatgatctgggaatgaagcaatggaagaagcacacatagaacatcaatgcaaattttatttataaagattcaaaaacatgtattttgttgaggtccacttcataaaacttactactctttctctttttatttgaagactattcactgcatagatacatttgggcatagattaaatagaaaattgaagctagttctgtacttaatcagcaaaacacagtaagcatactccaagcttgaattgcctgctgtccaagtcttatccaaagccctgctgagagaagcactattcagggagcattatttgagggacatgtggttctatctgttcctccataaaacctgttcaaaatttctgcattcagtggaaccctcagaacctatgtggcccctcgaagcactgttttcagtgaggtccaattttgtgcattaaggtgccagcttgacttatagacgaaaactgcactaagcttactgtaggtcttttataagggacattacaatctacatttcttagtaggtgaaaccccgcataacaaaattctgtttattctaggttcagagaaaagctcatcatcccttgagcaactcagcatctcctcacagaaaatcgaatcatataacgggttgtgtttccgttttcattctggctactagggagctaaacgttagttttgaagctcaactccggtaactgtttacactgtcaccatcggcacacctgcattctaacgctcttctttaactctagtatttattttaatttatacttttgtttgattttagtttttgctgatggtttttagactttgttttagtttttgctaatgctggattttattgcatgtctaacattgaagaacacatatgggatgtgaattaaataataaacatcaagagttaccgtgaagacattaaccataaaaatgtgtgggtatggccggacagaggtatggatagggagttaggctgggcagccagcagcctgatatatgtacatgagtgtcacaatcttcactatcacccaaaggcagagtcactaccttcttaacaggtagcacagtgctcttccctgtcctcaaagcccgaggctcctatttcctctagcctgaggctgttgcccttcctaccccccataactccagaaaatccctggggacaaattgaagccacagcatctagctgttttctgtgctgccctcaggccacttccactaaatctctccctcttttttttttttttttttttttttttgtgagatggagtctcattctattgcccaagctggagtgcagtggcatgatctctgctcactgcagcctctgtctcctgggttctagcgattctcctgcctcagtctcctgagtagctaggattacaggtacctgccaccacacccagctaatttttggagttttagtagagatggggtttcaccatgttggccaggatgctcttgaactcctgatgtcaagtgacctgcctgccttggcctcccaaagtgctgggattatgcctcccaggtgttgagccaccaggcacagcccactaagtctctcttttgacctgcacagagtccttcctctccatgtccaccagctggaggtggatccaggagggtcttctctgcatggctgcaggtacccttggaagttccggaagatgtgaagagtaaagtacagtggaacagccactgcaatacactctgatatgtttcatccaatgggggtggcatttactgagacacagggctgggcactgtggggtgatgcatagaagagacaaggctcagcctccaggtgctactaccctgctagcagcacagccatgcaaccaactgtgggaccaagagtgttgtctgttctcaacttataatatgtttaatgtttttttttttagcactgggtactcttcgtccgacaagatgtagcagattcactttaggagataagagcagagctgtcctggttgggtggactaggctttcaggcttgcccagctaaatgtctctgtgcttccagctcctccacttctgggtaaatagaaccctgaggtccctcagagaacagcctgaaaaccattaatatggcaatgtatagcagttaactacctgggtttgaatcctagctttgttactcactagctcttgatcctgacaaagttacttaacttcttggactctcagtttcttcatctgcaaaattgggacagaaattatgcctgtttcattggggttgtgaggtttaaatgagctcatgcatataaagtactcaacattaatttagtgttactacttagtcaataagtaatgaggactcataagctatagctattagtcttattaaggacttattgctattagtcttgtcactgaactgaaagagttactggattcagtaaatgagggagctcgagctctgtcaatctgagacctctcaaagaggagataatttttccagtcagggagatggtgtaaaagcagccacatgatcaagctgcaagtcaagtatcaacaaatttaagatacttttttctttaatcacaaaaatatcacattcggatttttcaaaaagcaatgaaaactcttccacgataaaattttggcagggtgatcttcagcaggccatttgaccccctgagccagttcccttttctgaagaacagaggcaatgaacctctgttctcagagttttggggaggctcaaatgaggcttgagagtgccaagcatcctccgagctgtttgtcatcgagccccaaggagcccttggcacctagtaggcgtcagtaaatatttgttgcatctgaactctttccatctgggaagccctccaatggcctggaatctccagctctcccgctaagcaggtcagaaaagcaacttaaaggatccattttagtgtccattttctcacttttccccctgaaaaaccacttacaaagctgccagcttcctcatttggctttttctggcctggtttcatcttattaacggtcacttcattcatcagcataaggaagactccactctgtcaacaggagggcagggcttggcctccagtcacagggcaatggcgggggtggaggagcctggaaacagccatagcgtaggcttaatgaataaaaagttgcggttgagaaggcccaggattcccaaacagccttccctccacccccaaacagctgatcattggatagtgaggaagcaggtgctccttcagaaaactctgttcattcattcattcattcattcattcattcatttaactactcattcattcacaactatttctcgagtgcttattatgcacggggaatagaatgctgaacagaaaagcacacccactccctgccctcatggaacttacagtttggggggaggatcactcacattaatcaaatgatcctcgccatctttggggctatggtgcattccagggaggcttcctgaggagatgaccctgatctaagatctaaaggagaccttggaggaaacgggctgtggggattggggagatggttcaaagaacatcatatgcaaaggccctacagaaggaagaacgtttttgggacacagacaagcaagatcgagaaagttcacttgcttttgatgggaccctcaggctggagacacgctggtcaccaagtagcgccaggtgctcaggcagaagtcagccgactctgggttcgagtcccagccccactgctggtcagctccttcttatacctcagttttccagctgtaaaatgggactaaggccattcttgtaggccaatggtgaggatgggaaatacgcacgtcattacccgatgggacggtgccagctcccctcgtccaccgacgtgggcccgagctagggttctgagccggatccggggggaaccgcgcgtctagggctggaaacccgccgccacagcgggctagaggtcgtccccgcccgcaacatatgcgcgaaggaaagtgctacgaacgtcaaatggccgccccccgccgacgccatctgctctgcgaagcagaaacggcggcagctgcgcgcccagtccctccgcccgcgccccgcgcgccgagtccggatccgccgcccggcggcaccgcggacagcgccagccccggggtggcgggcgcggggctgggggcgctgggaagaggggtccgctgtaaggccctcccgccgcctcggggccagtctgggtctagccacttcacctgtgtgcttgaaatgtcagttctttaccagccaggctgccgtttgtttggctccgccctccgggggcaaaccaaagcacggataactggtccctgagacagataaacctgggttctaataacagctcaaaaaccaaccagctgtgtggtattagggaagtcgcttgacttctctggacctctgttttgtcttctgtaagatgggtataataagcgctgtgccctagggttgctaggaggattaaatagaaagttctatgtgaagtgtttaacacaatgcctggcacataataaaacataactgctagctaattattttattcaaagcttacttttctagggctttatggttactcgctgggtttctgtggccccttaaaatttcagcttgctccccatccccactctcctgcattcttcttcaaacgtggatgaacaggcccaaagatgctgcagctttttggaacatttcaccacaacattgggaaatccctggattccccacactctcctggtcctgaaagagactcagtttgcaaatgtcttttgatgttgtccagaaccatccgttataacaaaggccattttcaaaatggtaaaagttcacgaagggactggctagaagagtggctggtgggaaggcagggtggtaacagaaagtagactgagaacagggaaacaagaaaataaagaggccggaggtagggaggtggctgcattcattacattaaaagtggatcattccaggatttcatctcaagcaaagataatcagaaggcatgggctttcgttaacattttaccacttagcattttggctatgctactttaggcagttgagttcacaaatgttcactgagtggctgctatgtgtcaggcgctgtgctaggctctgggactaaaaaagtgaccaaacctagactgtgccttcaggagttgatggcccagtgggaatcagacaagcatgggtggaatggtagggggtgcctcagggccccaaagagaggcctatcaacattctaggggtttagtgggagtcaccaagctttaccacacctcattttcccatctgaggctccgggctcacaatccccacctgcaaggcttatgataagtagcagctgagcctttctttactcctggaacctgaccacctaccctgcgccccaccccaaaagctcagcactctgctctccttcagtagccaagcagctgccacaaccttgaagactaaaaagaggaaaacaggagaaaacgttatatacaggaaatcattgcacagcacaagagatgtgtattacaaaccccgacgtcgaaggtcacctgccatactccatggtgcttagggtgctaaacaatatgaatggaagatgatgatgggggtgaagagaaagtgaaggggaagtggaggggcaagagtggaagaggaagatttgtcttttatggaagagctgcgtcatgtttattattttaacaaatgtgtgattcaacaaatatgtactaagcatatattctttgcaagaaagtgaacagatcaaagtccctactctcaggaacttatagtttcctagtggggcttcagagtgcaatcaagtaaccaaaacatatgaagtggttggtgatgagtgctctgaaggtgataaaataataataaagggttaggagcaacagtgactgctgatttatgtggcatctgagcatgtgaatcctaatattcgataattttttgtctgaacctagccatccttttggcaggggggaagcaaattattcatgtctaactctgagtaaatatgttcaattcaccttaaattttctaaaacagtcttctattagaacatataggcaaaatgagcccttaaaaaacacccttaaacctgttcagattcaactaatacaacatgtcaatatagatgcttctagagtcttttctatgcatatactatatatatttatatataatttaaaagggatcattacatactgtgttataataatattccatgataaactttccttactggcagacatattttggcaatattatcttaaataactctatattattcattgtatctgtgcatcacaatttaattaactgatcccctatgatggagcattattttaaataatgccacaatgaatctctaaatatttgcccacatccctagttaatttcacactcacagagtcctaagtgtcttcctggagactttgggacactctcaggcaacagaggagcagagaagcatgatggtgtttttgaggggaagaggtatcaccttttggggccatctccctgcaaaataggtagcccaattccttaaattttggggctgcttttggcttaagtctagcacccaagactattttgcactagacaaggtcaactttttttttttaattgtcaattggctcattgtctttattaaattacttatataatacaacttaagggacccagaagtgtgctgcaagcctcttggggccaccacttttagtgtgtgtgatctggagcagttgtccaaggtctctgaggcttgttgttctcattcatgaactggggatgataataatatccctgtcttacaaagagttattgcaaggaggaaatgagatgatgtgcatgaatgtgcctatgctaaagcaggaggctgctttattcacaatagctgatgtatgccaggacctttgctaaacactttgcatatttaatcctcaagagagctcggtggggtaggtattatcacatccattttatagatttagaaaccaaggctagagagggtaaataacctgctgaggaaatcgaactgatatttgccatcaaatctatctgaattcaaagcctgtgcctcaaacactactccatcctgcctccccagctacactttaattgggttaccaatgcaatccaaatgttccattagcactttagtatccaaatccccattaccgtaagcctccaccaactcatgttataagtcccgacccctgaggcattcgcctcccctactatttctggatctcttaccaaggactgaaatgactttacccaaattagtgcatgctgctatgtctagtcaagttggtcttctagaaccaccgtccacaacaggcccatggtgagctggaatgtcccactgccactcaattgttgtagcaggtctctggcagtgtctcgatgccaaggggcaaggatcctgctcttgctactcccatgttgtagattactccccagttacccctatttgcaaaatgagtaagattacccttggtttgcgttatgttcagttgaggaaggcagagatactgcaggaggtagaagcataaagcaagggctcagtaagttttctacttttttgaagctctttttacttttttcctcctgactcaacttttgcccctcccactgtaccctaagcagccaccacatttgtgtaggtcatgctggaaccatgtttctaccagcagctggtaggtaaacctccaatgtaagctgaaactctgttgaagtttgacctggccaataatgttttcaggagatggctggagatggtgtggctaagttagaatgggaatcccaccgtgggggctcccaagcatcccagagttgagggagaccctttaaacagtacacttgtcatggatctttctcttagggaacagacattctgccaagatggctaagtcagaatgagttctgatgtcagcagttaccctgaaagcatcagtccctctgatctttaagctacttgctaaatatgactccatcatgaaagatttagccaatcaacaggtccatcgaatgcctactctgtgtcaggtgctattccactattctaggaactaagatacagtggcaaagaacatagacacagtttctcactcaagaaacctagagacaccagctttccttatgaaggattctccctctgtgcctctaatgtcttttctggcaacttggcttccattagagcccctataaatctatcagatatatatctgtgtatctcataatcccagctgtggaccaaattccagttctttttctctgaaggaacttggctctcactatacttaaggccagggactctggagtcatactgtctgtgttcaatcctgaccatgctcctcacttattactgaccttggacaagctacttaaccttccgtgccttggtttcctcatttgcaaaagggggtaataataatagttaacactatcaagtgtctaccatatatgccaggcactgttccaagtgctttagatgtattaactcaagattctcacaacaaccctatacagtaggccctattaatactccattttacagacaggaaactgaaagacagaaatgtcaagcaattgacaaccatggaataaatcttataagatcttttaaggatttaaacaaaggacacagcaagtggccaatgaattgctattgctatcattatgaatgacaattttaagtgaaaaaagtaggatactaagtactagacagaggcaaattttaactgtgaagaaaagcacatagaaaaatctagaaggaaatatattaaaatactaacagtggttgcctgaggaatagttagatgagtataggtgacgtttttcatacttctcaggacttttttgttttgttttttcaagacagggcctcgctctgtcacctaggctggagtacagtggcacaatcatggctcactgcaaccttgacctcccaggctcaagtaatcctcccacctcagcctcccaaatagactacaggcgtgcaccaccatgccaagctaaattttgtattttttttgtagaaacggggttttgccatgttgctcaggctggtcttgaactcctgggctcaagcaattcacccacctcagccccacaaagtgttgggatcacaggcgtgagccacttcacctggccaaaaattttttttaaataaaagctttccaaatcttttactataagtacatatttctttaacgttcacgaaaaatagtgccagaaaaccttggagaaaataaactccaaagctgctcctctggcctaattttttcaggggccattcctgttgcccctggtgacaactttatattctcctatttgagggttctagactctgtggcattcccaaggccatctgacttggtgacccccattcagggataggaggaggccttcatgcatcctgcacttccccagtgaattgcagatcccattactcacttagcttcattatatctttaattatgaccttttagtctgaatgaaaaagaagtataattttgctttaagagatatgccaggcctacgctcccaacatttctaggtttcatagaaattgcagcgatcatagaaatttaacctgataattactgcaatatttcaaggcacacggtttcctactctcttagaataattatgggttgttgtttttttctcccaaattcttttatttcttcattattaaaggttatactagtttccattgtatgtgcctagagacataggaaaatgcagggcatccttatccactctggttcatagcaccctattgtgaaaatatgttgtccttttattttcccctgttattatttctcttagactataagctttatgtgggccaggaaaacatgtatttggctcactctgcttacagcgcctaaaatgggacttagtacacagcaggcatgctgtaagtatctgttaaatgaatgcccagacaaatacatttagaaacagataaactaattgcatttgtgaattgtaaagcaaccttggtgtcatcaaactcctgttgagagtccgctccggaaagaaagcatgggtccacaaagctacaaagaaatgattgcagccagaggggtttcagaattcaggaagtccaaattttataaagaatatctaatttaatttcccagcagcaattgggacagaacctcacgatcaaacaagcaaactgatatatttttctgtgaaaatgtatgagtatttacatcaaatgggacaaataaaaactagaagtaacctcaagtcagttcagaagactttttgctgctgaataattcaggtcaaatccaggtctactgttaaataagttagaagaacttgtggttttcagagctttttggagtttggaattgtaggtaaggacccggggacctttaggagtcagtagatccaagtgtgtgctttagagctggcattgttccatctaggtccaccacttcttggctagattcttgggcaaactgtttacattctttgtcttctgttttctcatctacaagtaagaatcataacatgacctaacatacagggttggtaagaggatttaaaagaattgacacataaaatctgaccccataataagtgcccaataaatattagctactgacgtattaccttatttcatgaagcaaacagcttgtgagacaggtgttatattttggttacctgaaagatgaggaaacagagagcggggcaggttaagaactggcccagtccaggtggctcatgcctataatcccagccccttgggaggccgaggagggagaattgcttgagccgaggagttcaagaccagcctgggcaacatagagagaacccgtttctactaaaaaaaattagccaggtgtggtggcatatggctatattcccagctatttgggaagctgaggtgggagagtcacttgagcctggaaggtcaaggttgcagtgaaccatgattgcaccactgcgctccagcccgggtgggagagtgagaccctgcctcaaaataaattttttaaacaaaggtaggaaacagtggctcgtgcctgtaaatcccagcactttgggatgctgaggccaggagtttgagaccaccctggacaacatggtgaaatcccatctctacgaaaaatataaaacttagtagggtgcagtggcccatgcctgtaatcccagctactcaggtggctgaggcacaagaatctcttgaacccaggaggcagagatttcagtgggctgagatcccaccactgcactccagcctgggtgacagagtgagattctgtctcaaaaaaaataaaaatgaaagtataaataaaaagaactgacccaaagttacacaatggggcaagaacagggcaaggatttgaaactgcacctgcagcatcctgtccactacacaggcccacctaaattcttatatcccattcaatattcttttatcagtgcttactctgctttccctcttccagcacagaaattttgaggaaagacatgaaaagcccaggaaaaatggaaagcgtttagatgcacattttattagcaggttcactctctcctctctccttctttctttctctttttgttaaaaagcaagaggcaaaagaatttggcaccatttccatcatgttgattcttctgggtttctcaaatgttgtgatccctggaaagccgggattcatgcttacctccactcttcattaaggcggccgtggctgtgagctggggaagacaggctgctggtgcggtgggtgggcgtgctgaataacacccgaaccacagctgtggctgcccttgtcagagtgccagcctgcctaacccagtctgttcttgcctgctacctggccctcgcccatctgctgcagaattcataaagtgctgaagatcacaaacatctgaacctattataggtaacatacttcaattacattctgattgtgggcttggcttcccccaagcctggtttgtaatggtgcacagatcaaattctccccacaaaagaagcactcatctctaggtaatctcatcatgttgggtgtgcttaagaaagaagccattctcctagatgctgctttgtgttattcagttacctggcaaaggttcccccagatgtaaatgacagagagaaagagagagagatgtaaaggacagggagagagagaactgacttaaaatcttttcccatgaacttaccatgtttgtgtatggatctgtagtttgctttctccactatggagcaagtgatttgttagttgaaatgaccttagctctcctgaggcttatctatcttggttgttggcttatatcacgcaaattatgaccactcttccaaggacatcaaagaataaactgcccatatgtccctcagactgtgctcacatgtctcttgccttgcccctcccaaggagctctgggcagcacttaccaggcatagtaccctgagctggagcagcactcaggttgacccagttagaagcctgacaaggaggacatctcagcctctgttcaaggctgcttccactttcgttttctactgaacttgcaaacaagcagttaaaagaaacacacaaatgcccagctgagccatattagagcataaggcaaaaggaaaaatcagaaatatcagtactgattttatttaaaatgttagtattttatacacactgaatttttgcattaattttgatttttcaacatattgcatcagaacctgatttatcttgattatggagtttttttggtgttctcttaaattttgttccaagtcccagccccaatatgcacccattgaggagtaagacgctggagtatttatgcatcaactcctgccctcattggttggttgttgctcagggagcattagttaactccacagcacttctagcttgcccgctgtgcaggttagacaggcaccatcagcgtcagccacaatgtctgtcttggactaatcatcttggccagagagaagtagcgtgtgattggtagtcctttccagaaatgatgtggcttgaaggagcatttcccgaaagaaggctttgtattctgagcagccctgtgtctcctgaatgctctacatagccctttcttagatattacaagtcaatgcattccttttttttccccctcaagatagtttgagttgtgtttatgtcacttgaaaccaaagagtcctgactcttgcaggcagacagctgagagtagtgtcgagcctcattagggtagggcaacataggtgttgggggatgtattagtcagcattctctagagggacagaactaatagtatataatttattaggagaattgactcacacgattacaaggtaaagtcccacaagaggccatctgaaagctgaggagccaggatgccagtcagagtcccaaaacatcaaaagtagggaagtctatggctgaaggcccaagagcccctggcaaatcactagtgtaagtccaagagtccaaaagtggaagaacctggagtctgatattcgagggaaggaagcatccagcacaggagaaagatggaggccagaagacctagccagtttagcctttccacgttctcctgcctgcttttattctggctgtgttggcagctgattagatggtgcccacccggactgagggtggatctgtctttcccagtcaactgactcaaatgttaatctcctttggcaactccctcacagacacacccaggaacaatactttgcatccttcattccaatcaagttggcactcaatattaaccatcacaggggaccagtggagtattcctgcatttggggcatcatggggctttacttctctagcatgtcaaggtaggctggaagagaatttggagatcctgggtggctcactctaattgggactaacaatagcagcaaacgtttatggcacagtatggttctaaatcatgttcaccctcctatttctttccccaccaaggcttagaggtacaggcaaggcaagttatacaatcccaacttcacggatgaggaaactaaggcttcaacaatgacccacctatagctaagtggtagcagaggatcttgtcttttaagtcaccaaactcaagcaatgagacagaacaatggggctcattttgaagcagattatcttcctgttattctgttgatgtaaactttagttccttggttctattccacgaattctgtatgaagtcacaagtaattgtcagtgcttttcagaaacagggaccttgtctttgtcacctaatctgcagctcccacacaattcctggcagggataggtgctcgggcaatgtttgttgaattggattaatactgaggaaggagaagctcagaaaatttctggcactaggctacgctggacatttagaggaaagatgaaatgctaagaataggtctgccatccacttaatgaatgtactgtgccaaatgctggatgtacacctcacctgtatagcaactgcataaagtaaacatcgttcatcctgttatacagataagaaaagagaagttcagaaagataaggatcttactcagtgacaggactgggactgaaacccaagtatgcctgactcccaaatctgtgttcctgaatcaagtgtgctctgtcatttggaagctatactaagtcatcttgcaattccatataacaagcttgatagaatgaatagcctggtcttatttaaggagttccttttcctctcctatcctctaggaggactccagagttctttgtacttttgcaaatgacgggtggagaagcaccagaggttctggagttagagtaggttggaggcatttagggagagtttggagaaggaagcctaggacagtatggaatatgaggtgaccaggagaaggaaaaggggatacaagagtgttactgggggcttacgaattagattcctattaaatcagtaaatatgcaattattttttgcttatttggaaggtgcatatttgaatgccagactgctgggaactaaaggatgtgggtcaatggagtgtcataggaaggtcagttgagctgccctggagggatccaggtagaggctgggcagcaccccagtgaacgtaggtaggggatccaggcattgactggaggagagttggaccacaaaacatttccaattttgtgtatctccaaatctcccactctggctaagcatgaaggcagcctagccattttgctcattcctgccacatgtagttcccctcctgccttatcaaatgtttatctgtccccacctcccaacccatcttaattatttgcaatgatccgtgatagacacataaacaactctgcagcttaaaattcccccatcaggcaaatatgaaattattcacatttttcttgcaggtttttcatgaagcaagttggtgatgaaatgactctcaaacgccttccccattttacgctggggattctgcctttaccctttaatgggtgtgtgtcttcatgcctcagctacactgagcgttctccttccctgtttatgtttattttggaagcaaaatgtgtttacaaaatcagttaaaaagtgttaatgatcagtttccagaatactaatgtgaattcaaattactttcacatgaatcaagacaaattaaaaaatgccatttgatcacaaactgttttaaatttgtgttctaagtggcgcagcaaatctgaatatacgctttttaaaaagagcagtttaaaataaccattctgatggcatgaagcagttttgaataagaagtctccttccaagaggaaaggtcagcttttgggcattcatatgggagaaggtatggggtgacatgtgccccccgcttcccagagaaaaatattgtttgtaattgtcaaaattaggactgagctataaaatgttcatgattttcatctgtcttgttcactactatttttccagtgtctggaccagagcttggcacattacaggcactctatttgcagaataaatgaatgaataaaatcagctatataaattataaaatttaatccaagattttatttgctctgagttagtataaaaattttgaagttcatagcaagacagagtagaaaaatgagggccatggcatggaaaagtcaccaattccaaatccatgtaatattcctccttcttgtgctctcctggcccatgctggtgacccagtaaagttccttctgccaatagtagcttctgacagtccgagacacaagggactatgttggcttaaatgtggcttttgcagaatcacaactgctgtctacctgaatttacctgaatacctttttcagtggttccacctcctacctataatggagatggggacttgtggggtgacattgtgccgcttccaggcttttagcaggcaacttctcctggctcggatgatctagagcagtgattttccagcagttcctgggggtctggtgagaagaagacaggcctggagttgaaggagagaaaaaaggctgggctggcctgttggaaggagacttccacctctgcaagcatccccatcttgtttggattgcaaactcagttgccaggtaagattttgtttcattaacatcttcaagtgctattttattttattttattttattttattattttttgagacggagtttcactctgttgaccagactggagtgcagtgatgcaatctcggctcactgcaacctccgcctcccaagttcaaacgattctcctgcctcagcctcctgagtagctgggactacaggcgtgcactaatttttgtgtttttggtagagacagcatttcttcatgttggccaggctggtcttgatctcctgaccttgtgatctgcctgcctcggcctcccgaagtgctgggattacaggcgtgaaccactgcgccaagcctcaagtgctattttaaaagatggtggtggtttgggggaggattgaaaacatttatctacacagctaaaggagctggcaaagaataaagctatggttctggatccggttccccaaggggcacttaactgcctgtctctgggttaatgcatgcggggcacacacagtgcctctgctagaaacgatgcaagctgagattctctaggctgttttgcaaagactctccatgtctctgttttggaatatgtttgtatcacaggcttggttctagccgagaggctgtgtagaagcgggtgaatttgacttagatgttgcccaatgttccaagggatctttggctcttggcccccagaacagaatcagataagcccactcataagcaactttgagagagtccaagtctatgccttcaaagggtaaggagctgtttcagggaaagaaggaacctaggccaggcacagtggctcacgcctgtaatcccagtgctttgggaggccaaagcgggctgatcaagacgtcaggagttcaagaccagcttggccaacatgatgaaactctgtctctactaaaaatacaaaaaattagccgggtgtggtggcaggcacctgtaatcccagctacttgggaggctgaggcaggggaactggttgaacccgggaggcggaggtttcagtgagccaaggcatttcaaaaaaaaaaaggaaactaaaggatttgccagttgggacaaaatgatgtctgagcagcctgtcgggattagaagcacttcctagaagtcctggaaccccggacttactcctcatccccaccccatcacttagacactaggcaggaaatatccagttggatgccaaagtgacccaattgtccctcctcaattgtctctctaaaagccaagcaagatgaggggaacggctttggactcgggctgacttggaccacatcccatctctgccgccatctgagctctgtgaccgtgaagtgctcctaccacccttctgagcttttgttttcttcacctgtaaaagtgcaggaagaatacttacctgtcaccagaatattccaagaattagaattaatgtttggaaagttgttgacacctagcaggtactcaaaaaatggtggctattactactacattctacagtctctgcgctactttgaaaggacttgcttctaggggagcttatttctaatggggagatattttggttttgaagtaaaatctataccgtgttagatgggaggtgtgctttagagaaaaaataaagcagggatgggagactgagatggctggggagcctgaggaaagccccatttataggtctaagaatgagagagagtttctttcttaaattccctctccctactttatcaaagagattttacttccaaataagtgtaaacgggaaaagggaacagagcctgaaagacactcaaaacagacactcaaaaatgctgtcctagggagtcagctggggtgtcatcactgacgtgggacttagggtgttgagctggagtcctggtttgtcatttgaaaagagaaatcctgatcaagttgttgtactgctctttgactctatttccttaactgtaaattagaggtaagaatccctgtctcacgtgcacgagcaggagaggctttctggtctgttgggattctcagattcacaaggatcaggacgtggccattgaaagctgccatcccaagaggcaaaactatggaagataggaaggaaatccgtacttacctcactctgctccctcctcctttccgtgcctgcgtgcacacacacacgcatgcacacaccctgaggttgtcaggggactagaggtgttgtccttgaaagtgaaagtcattccaaggcaaaggaaatgtactggtgttgagaaggttcggtagggccccttccaacgggaatggctgactcgccatgtcctctaaagatgctgccttgattcgtggatttcagcattgtccaagctctgtggcaccatggactggttgtatgtcactgacaagcaaatgcttagtcctgtgctgtatatatttactgtaccatataaataataaacactaataactcacttcatcctttacgagttccccatccatttcctgccatttctggaactttcatcacatgctagatggtgttgctgacgtttattactggttgctcatatagggtgagaaatcattgttgcctcatgaatagctagcatttttttcctctttcattgaaaagttattctaactcaatctaaatttccaacaaccaggaagtatttaaataagtcatcttccaaccatctcatgaaattacataaccactaagaatcatgattttaaaagctattcaacaatacagggagaaaaatgctcacatcacaatattaggtaaaaaaagcaatgcagaaaatcatctatccagcgtgatccgattttgcccatacatttatatgtagatttatgtgggcacattaaaagacgtggcaaaaaatgttatttctgcgtgagatggtggtgggtgatttttattttccacattttacaaattttccacagtggacttttggaagctgaaaaaatagattattcctttatttgaaaattttacttttaaaggacattttcataaatttatttttaaatgttatttctttaaaacatttcaagacaatctaatacatataacaataaaaacgccagcactaatgtctgcctgacagtggccaaaatgggtgagtgtgagagagatgggtttggcagtcactgtgaaaccagcaatgaggttaactctggtttggggactatgtcttcgggatctgtgctttgttttgttttttcccctctaagtatgggtgttctatccacaacattcacagtcctacatgtagacatatgacaggtgtattttctgttttcagatttatatccacctacaaaattaccctgtgaaagccccatcactcacagaaactattgctgaggaggagaggatgattttatttagctaatttttaacaaatctccaatgttgcccacatctcctgaagctgggaggagggataatcaagtcaagccccattgactaggagaatagtgaactgtggaaaatgagttctcagcacgccacagggccacaactccatttaaagaacacgttcattattcagacactcggccttcttccggggctgttggcctgtccccagggctgcctccattcccaggggccctgcagccttctgagccagcctcatacgcatgttggtgctggcagctggtgtggagcagctccaggcaccactgcagtggatccctgtagcagcgctgagaaggacacgagcacttaactgatgttttcgttttacagatgaggaaactgaggctctgatggacgctgttgcatgccagggtcacacagccaatcaaggatagctgtacccacatgttttcactccaagaccattgccatttctaatgtgtgaagcatcttccctccactggtccagctttagaagatgtgattctgaccagctagcttatgttaagatggatatttaaaaaccagctgtaaacaaagataaaaacagcaacaacaaaaaaagacagacttccagaataattattaaataaaatatataaaagattgcagttttgagctatctaaatgtgagacaagcataaaggcagacagagctgaattcaaaccttagcttagccactgcctagctgtgtgaccttacacaatatacttaacttctctgagcttcagatctctcattaattgtacagggattgtaaaatccggctcatgtgcttgctgtaagggcttagcaagataatagaggtgaaaactctcctttcactctgcccatatagtagaccctcaataacatatagttaatttctgtctcctcttcctctgcctctccctcctcacttctcatttttcttcactgattcttccagcagttctgaaaaggggggcaggatgattcatatgttcaataaacatctaagtgccaagcattattctagatgctggggagagagggcactttggagactcataaccccacatggtaaccatcagcaggagtgccagaggggctcacacttttggaggggtgcatccactttgctttcttactttatccatccagctcctgcaggcatttgagtttatggccctgatctaaggtaacgttaatcaagaattttctaagactctgtggaagctgttaggttactcccagcaggacctggtttcaggaggggctctagttgcaaagctcaaacctatcaaagctggcatccatcctttgctgggatgcctgggaaagactgcagcccaaaagactaataaatgaagtggttgtcattaactatgtattaattcattcataagtcacccacctcacagtattagatgtaatagattctaggtacatatagggtgctagagatgtatatcagtgaagaaatctttgtccctggtcttaaggagttgacaagttaagcaggcatacaagcttataaagaaatcactacaacagagcatgaaatttgtgagtctgggtatagggtacagatgaggaaccgcgggaaatgaggctgaagaaacagacggtgttcagatcacacaaggttttgatgacccttctaaggagcagagatttcttctgaagcaaagagaaaccaatgaggagtttcgataaatgacttccccttctccaaatccattttctttccatagttaataatttattttttgaaagtactagaaggggacttagaaatcatctagtccagaggtaacaaacgggattcatctgatgagccaactctgatcagaaggtgggagctgtctgtgttgagaaggattctgcagccaagtctaggctcattaaaaccacaattgattcatgatgtctgccacatacaaagaaaggaaaaggtggcatccaccctaagagttgaattatcatctttttaaagtaaggacatttctttgcacaagtcacacaactagttgatgccagagccaggcctagaaccgaggactcctgggttgcagcagagaacctattctctgcaccatcttcgctcagtcctccttcgtgagcaggagcagagcaggaaacctggttcccatgacaaccagcctctatgtctcatagggtatcaagaccatccagccagagagtgctaaagtaatagggggagcgcttctgtcatgtaacactgtgtaacaaaccacccaaagtctaaatgtcttacaatagtttattattgtctctcatgattctgtgagttgactggactcagtgggacagtctgctggtctggcttgggatgctcatgcagttgcaatcaaacggcagctggtgttggagctatctggaggctccacgggtgggactgtgaaaatggcttcttccctcacacctggcacctccatgcccctctacgtagtttctgtcttcatcaggagcctcacccgccacggcctctgcaggggtctctctccagtggagtagctggacttcttacacagtagatggcttgcgagagtgtacaagtggaatctgctatgccttcttaaagcctggaagcagtagagtgtgatttctgccacatcctgttggttatgggtgagtcacaggtacaatccagattgtttggaagggtgggaggggactgcacagggatttgaacaccaggagtgcttcatggggactggcctgggggacaaactaccactggagtgaaagcaacggaaacccagctggagtctcagttgttccaccagtaagcaggtggccttggcgaggcctgtcgggatgccagtttccatctctggacggtgtcccagaggggacaaagctcccgccctggcagttagtgcttcttctcctccgccttttcccctgctctcccccaagacttctcaggacagtttcttcctcagcactattttccttgtggtggagttggaaggatagaaactctaaccagcagtcagagagggattggcactggacccgacgtctcattatgttgaacatcattgtgccaacctaagggaaacggtgcgggttgtttgttatcgatggcaaatcttcttccaagagtggcgggcccttccgtcaacaacacaaagtgtcctcgctcccggccccctttccagccctgtgactcatcaggcctctaacctctttttcccccacagtgagaaatatccaagttgataacagcaaaaacttgataatgactagtgttgggaagagattaaactacttgtaattccaaattgttcaaaatcaactctcctgacctgccaggatagtgagacttagaaaaacaaaaacaaaaacaaaagcagaaaaccaaagcggcaaaaagaaacaacttcagaacacaaatttaagacacgaattttgctcagttcctagttttgactctgagcaatggaggtatttctaacaaaagaaaatctccacgtccgtcctatgtttggaatattcactggtgtgtaattcctagaagtgtgctgagaatgatttcgataaagagaaaggtgcttgacttctgagatgctgagaatgatctgtttttaaggaacgtttttcaaacgtgaacaggccaatgagagaaatggactgccctctgttggacagagatagcaaaatcagccagggatggaggaggaagctctgtggcagtggcttcagccttcttgagaaggtcctcttgggatcttttaattgtgatgacacagacctctcatttaaatgtggcccaagaaacacagaagtaaaattttagagacatccacatagataagatttgcatttctacaatgtatccagctatgtgttttcagttttaacagagaaatgtcaaaaaatatactagtaaagtgcagggtttagggagatacatatgttaataagtatttgaagttgaagaattgggactagagctactctattcctaagtttatcaaacacagaaatggctcatctgacctaagatgctgtatcctgcaatgataatattacctcaaaggagttttagagactcaaactgtcactgtctgtttgaggaacacagtcactaattaagcttaaatgatgctttcccccacaaacatccgtgattattattgttttctgctggccaggtcacctacggaatataaagaaaagcaaatccaggctttggccctcccaggggaatgatcatgtcagcaagaattcacaaggacgttgactccagggaagggaagaggctatttttgttcattcacctgcagctagagctgctcagagcaagaaagattcagctatgttctacttttgcttcctttcaaaactagagagccattttcccaaacacctgttacccttgctttaaaaatatcttgagaagagtggaactagagaaaggaaggagtgtgagggaaaggattacagaagacaacatgtcttctgtgtgaatggtcttgacatttcatacaacaattaagaaattagcaaaaaaaaaggcactcatcacttggactcattaactccacttctaggaatctattcacagaaatactggtagaaacaccccaatgtggctacaagaaggtccactgaagcattgcttgtaataatagcaaattagaaacgaccaaaatatcctgaatagagaactgccagaataaagatgttacacaatggaacaccatgcagccatttaaaacaaggaggttctctgggggctcacacggacagtgcaccacaataggttcagttattaagtgactaacacatgttgcataacagaagtgctgttttccatttctgtaaataaaattgtattattaattgtagtttgttgcttaaaacgaaacctggaagaatatacaccagtccattaacagtggaaatctctaggagttgggattatgaaaggtggctacttcttaaatgtaatcggtccatattgtttcacatctttaccactagcatatattacttttgttatcagaaaatacagttaacatttgtttcattggatagatatgattttctctcagcagaagtactataggaagctacccattcataggtaggaagcacttcacattatcactttaatgatagaattaaattgctcaagcaaatcacaaaaagaaaaatcagatgaaatatataatgtaaatgcccagtgcctggcatataacaggtattcaataaatatttgctcaatgagagaataaataaatgaatgaatgaggaactgttttcctatgtgctttgttttatttgccacctgtttaaaaaattgtctgtaagtaaatacgttcactttgaataatatctccaacagatttccctgattacagaattcatttttttctctcatacatcaccagaaatcaaaatgctagggtggggagtgtgggaagtggtgagggagacataaaaatcaaggctttaacatgagggaaaagggattttcacaaaccaccaaagtgctacttctcttggaagaagtgcaccctggattttttccagctgaattctgcaacaaaacccagggaaaatgaacattaatcttttatgaactaagcccccaaatgaacagcctttgagctcaaccctaattaggttgcatctcaatacagagaatccttaacgaataaggacacataacaacacaggcaaactctctgctgggactgcctcagaaatgcaggggccgcccaggccactctcaactgctcctgtgcatcaggggctccagctttacctgggaaatacacattcatcttggagagaaagcacatggagttttctttaactgaaattcttggccatcttgctacctccatggccatctggggggtctgtggataaatgagaagagaaagagacaagaagcagtgctcttagagtgagtttcagcaagtcaaggtttcttctgctttgtgccccgtggagcagccaacactggctgtgctcggaaacaagaaaatccgcatatgcattatatgcatgatgtgggagggtgtgtagtgctgcggtgcctgagagacctgggtttgaatgccagcttagccactttctactcatgtgacctgggacaagttgcctaccccttctgagccacaattttctcatctataaaatgcggataaaggtgcgcttggttgggaggagtaaatgaaatgaactaagtagctctcagattgttcattgctaaccaagaccttatttctccaaccacagcttccccagccccattctatcacacaacttccacctctctcattcaatcccaacaaaacattgtaagataagtgtgataacccctgttttacaactaaggaactcagagagcagaggtcatttgtccgaggagacagagcaagggagcagcaaagctgggatttcacctcgaaaccgtccaacccaaatctcatgctaaccacaggattgtgggtcaacagggctaatttcaaagacagggaggactcctagtgttcgtagtgttcgacgtctcatagtcatggaattctggattccaggacccataagcaggttccagagtcaccagaggccctgtgtagagaggactcaggatgggctctgatggtgccattttggtgaagggtgtgtcggggggctccctgcccaaggcagctgggctactgtatccagccttaggaaaggcacccatgtgagccttcagtgtacctggaggactgctccagacaagcctctgggtaactcatggccccgatataaactcacattgtctcatcttgtctgcattgcttctgtcttcattcagtgcatttccccattttctttcccacggtcacacattgggatggtccttgacccccaagaaataattgcgctgatatcctccccatcttcctcatgagcaacctctcgccccacccctacccttagaccactggagtggacactgccatctcctagattctctgataccatttgtctggcttatactaaatcccttttccccctgcttgctgtcccacactagcccagcatctccctgctgcccaagaatgccttatcttattactgtaattaactggtaccacactagaaagctgagccagaatcagaactctcaggtgaagaagatttgccaagggttacagtgcatgagaattggagtggatagaacttggcacttaaaacctcttccctccatacagaaccttattctagaaactcattaactctgagcagtgcagccacatttccagaagaagctgtggtccaggaatgcctttggattctgcaatcctgctgttttcaattgccagtccccgagtgtttcctcctcctcttctcattatcagaatgtgcttcattacagaattctatgattatttgttgcagtaaattgcaatgatatttatattactcaacatttactgtgcatctactatgtgcccactcctgtgctgaatatcttacacatgatgtctcatctgaccctcacaaacaactctgagagggtgcattagttcgttctcatgctgctagtaaagacataactgagactgggtaatttataaaggaaagaggtttaactgactcacagttccaggtagctagggaagcctcacaatcatggccggaggtaaaggaggagcaaagtcatgtcttacatggcgacaagcaaagagtgcgtgtgcaggggaactcccctttataaatgatcagatctcatgagactcattcactatcatgagaacagcatgggaaagatccactctcatgatttaattacctcccaccaggtccctcccatgacatgtgagaattatgggagctacaattcaagatgagatttgggaggggggagacagccaaaccatatcagaggggcagtatagttattcctgtcttatggatgtggacaacaagctcaaagcattaggcatcctgggtgtttctaatacaaattaatgtttgaaaacctctggcttaagcactgcgggaacctagaaggagagaggtgatgtctagcctggagaatcaaagtgagaagtgagaactgaactgggtcttggaggatgggctggaggaagacaggaagaaataaggaagaaaagctttctaggtagagggaacagcatgagagatgatacagagatggaaaaagatacagaactgtgaagactacagtgcctgacataaagggagcctttaaaaccctgtggaactgagttccgctgaactgctagcttggctgtagcaaatggatctcacatgatcacatgcaatctagaagcaggtgcttgcagaagaagggaggggcaagaagccctgctctctgggcttgctggccactcattgaagtctctgaaccaactggtgaagtagctttcatgggtcctattttacagacaataaaacagagtctcagtgagacaacttgcttaattgggtcaaaagcctagaaagcagtagaatctgtattcagacccagctctgtctggctccacagggccctggttcaccctccaggccatgctaatgaaggaaggtctgccccccatttgtaggctccctgaacttctttctggaccaaaaatgagtctgacacagactagccttgatgggtcacacccatctcctttaagaagctaccgcttttcactttcttggcattttctgtatgagatgcagccatgccaagcttctgggtgcccctcgagaggaagaaggctacaaaatgcctttgggcgggcgaggaagcacccaggtatgggaggcagctgcaatcaaccgagaaggctgtgctgcttcaagcaaagccccagatggggcctccaatgagatcaccccaaacctccctggctgccaattcaacatctgtgcctgacatattggcctgcaaatatttcaggtccaaacccgcaaatccagatgtgtttgtgtcatgaactctctatattctgctagaaattactgaagtctgaaaaaagaaattaagcatttgctcaggcacacatgaaccagtgacctgaaattctctgtgcatgtctaggttttgggtgctcacacttacggactctgaataccagtttccactcatctcctggccctatttaccttcataggaggccatatgtaaaggggctgatgtttgctttcaattttgtgcctcatggaaggtttatgaaggtggaagttgcctttgcacagtggccaggcattgttttgtttttacgtattagtagttaggttggaactttgatctggttttcaagcactgcatttccaacaatagagtaaaccaaggagcattgcagcgcagccctggcttcacataagggtcacctggcggacttcgcagacaccagttattcagcccccataagaatatctggatatagaaactcagcaccagtgtttattttttcaaaattctccagtcatttctaatccatggttagtgttgagaacctctactatggaatctacccatctagactgttataaagtgatcaaaaacaaaaacaaggtgggagtagggagggagcaggtataggtgttaagacaggaataatgcatatcaaaatagtaacgctggtgaggtgggcattggctttacctcgaaaaattccaaatcaactctcaactctcatggactgatgagcaactctagacaaggcattcaatcttacagagcctgtttcctcatctgtcaagggggtaatgatacttgattgggctggaagaaagctgaaataagaatatgttagtaaagtgccttgcaaagtgcctggcacagagtaggcattcagcaaacggtacatattatggctaagtttcaacgtacacacacacacacacacacacgagagacagagacagagagagacagagagagagaaagagagaaggagagagacagaagactggaatgatgtatatcaaaatattaacactggaggggggattgcagatgcatttttttctcttttttctttcttcatttactatgtgtttgacaatgacttttttccttctaataaaggtaatataaattattctttatggaagttataatgataaactttgaagaacaaaatcagagtacaaaacagtatttgtaatataaatgtaatttttaacagaaaaaaagatcagcaaagtacctggaaggaagtcccacaaatgttgaggccaggttctgcacacagcccttcctgcccttccttcctttcttccttttgtgttctccaattcattctgtaatgagaagctactcgtgttgggttctgcctcccccgaccctctgaagatttacccaggctggtgctgcatccctgaggcttgtgatgcaaaatcttgtcctgatgcaaagccttccacagtttgccaagcctggactagggcatccttcacagaccaggccagagcatctggaagcaggcacaggccatgcagccactatatgctgtgtcagcatctccagctgtgtccccaggcagtatctcactctgtggttccccccaaggcccttatagtagcttcagaggcaacactttgctccctgttagtgtgggtgatgacagcagccctcagacacgaagatgaacaaccagtaggccagggatcctttagcagcagtgggaaggctgccaccaccatggtgggcctgtcctcagcccagtggcttcccaagtacacacaggtgcatggactccctgagtggctgtgggtggggtcttcagtgatgcagattttaaaacagtggagaagctttgaggtgctagaaattccttcttcaatactcatgactccattctcttcatcaccaaacatttttgtatatgccaggcacttctacagaagaaactatatgccacagctcctagcatgtgccaagcaccacatagccagtgggaaggcagataaatcagacacagtgctcctaaggtgctcacggagggagggacatgccaacctgcaatgacaatacagagggagaagcgccttgatggggaagctgggtgctgagcacaagaagggcacataatgggcctgggctgggggagatggtcagagaagaccctgatgcctgagccagttcttgtaggacaagcagaaattactagaagaaggtggggagaacatttcagcagagggaaccccaagggtggctgctcagagtcacaaggcatcttctggaaactgcaaggaggacagcagggcagaaggaaagagaagagaaagggtgggatgggcagggttgggaatattcccagaactgtcccctagaatttcccagatcttggacatttctgtacttccttggtggcttttgccacatctgtgttccacctgtattattattttaaagatatttttaaatgagtcatttttcagttaaatgctccacttaaatgtaccctcaaaggaaatttggcattgctaccataaatagaaaatcaataacctttgcttgctataaatggaagctaattataaagacaaatagagttccaaactactaaattcaacacacacacacacacacacacacacacacacacacacacacacacaagagacagagatagagataaacagttttgaaaacagggtgggctgagtctgaatcctgcattctttgttcaaaagggcggttagcaagtgttagaggatgataaagaaaaatggagattttctttgggataatcagaaggcttaaaggagaattatgaagggaatacgtttctcaccatatatttcaatgttccttaaggcccaggcactgggtgccacctagaacattctctcctgccactagacaggtgtgtcccatgttccggataacagtcccagagaaggggcctccatgggaggatgttcacatttccgaagataggaaagcccgagaaggagcaaagagaagcccaaatctgtccccaaaaacacatcctgaactttccatgcactgtaagcaatgtcttcaagcactagcgtgtgaaagacgtgagtggaagaacctagaagctatctccgcctcttccatggagccatgaaaggggctggaatccgctgagctctctataaacagttctgctggcagggctcaccactccctaattgactgtactgaaaattattcctgatgcccccaaagtgagcttttatcttatcacagcttggtaaatattatgatacgttgtggtttttattaccacagaagtatacatgttaacttttccatttatgagagggatggccagaaaaatctcggtggcaagagcttgaaagcaattaccaccttgctatttggagatctggccagatgtcaagggagtttatagccaaaccactacttcagtggtgttttgtcccccaaagtaatccaaaaattaatgtaccagaagtaaataatacgtttgtatagtacattgtgagagctgaggcttgctcttaaagggaataccatggaaatgcttttaccaataaggagatagatacattttgggcatgtttttgacttgggttaatacgtctttcttaggtccatgaacttctaaaacggtagaaagctcagaaaaaaatgaaaaaatactatattatgtgtgtttgtgtgtgtgtacatgtatgtatatatagatatccataccccaaattaattaactggctggcatcaacaacaataaactgctccaataaaactcaatttgagaaaatgaagtaagaatttatctcccccaattcccgtacaacagcagccttgtgttatgtagctgtgtgaaacctctggaagacaggaaaagctttggcctcataagtccactttgatgccactgctggactaatcccaatgtagaaaatttggctatttctggaaataacccatgtgacagtcatctccagaacccatggaaacctgcaggaacttcagtacattggacaggatcttctttacacccaaagatggcttcttgaacagcaagacccaaaagctggcaagattttagctaagctcagttagcttggtttgcttttctcacgtaggtaacttgtgagaaaatttggcaacttgtccacaacctgtcagacacatttgctatattgtgatcaaggacctctttgcatttttaagtttgataacttagttaaaaacaagaacagtgaataagcacacaaagttgtgtgcacgagatgtttgttcctttgtttttaattaataatgaaagactggaaacaaccaaaatctaagagattgattaagtattctattgttgttaagaagataggtctttatgcattaaaatggaaaggtattcaccaagtggaaaggaagtacttcacagaatagtctgtctctctctcttcctcccttctaaccatatatataatatattcttctgacctaatatatataatatatattcttctaaccttatatatataaaatatatattcttctaacctaatatatataaaatttatattcttctaacctaatgtatatatattctaaccttatatatataattcaaatgaaataatatatatataataacctcctaaccaaatatatatataatattttcattaacattaaaatatgtgtagttttgtatatttgcatatgcttaaaagttctggaagactgatatgatatgagccaatcttagggggaatttggatcatgaagggatttaaactttcttcatattgcttgatttttcattttttacaaagtgctatgcattttcaacaacattttagtggaattttttgtaaaagaacaaaatgatgggcacacattgagggattaaaaaaaagaaagaacaaattgaaaagaaaatcttaatgtgctgtcttccattccaccaactgaggaaccattaaggagatggaaagaaatgaaagcaagatcatatcagaccaaagactcttctgctctagacttagctgtcattttcagatcaaatgctgctttgcttaacacaaaaccttggtccttgattactcagccaactcatgaatctacagagaaactcaaactcagaaatgcttcctaatgtgtagtcaataccaatggcagcagggagaccaccaactcagtctctggcttgatggagtctgccaacagttaattgatccagcaagcccaggttcacctaaaatcccacttcttagagcatctagtggcctctgaaatacgctggacatttcattttcataacatctgtcatttattaagcaccaactacgtcccaaagactgtgctaagttatatgcgttacctttcatcttcacaaaatgtttggagatggacattatcatttccattttacagatgaagaaactgaggcccaggatgcttaagtaacttggctaaagttataagctcacaagtgacaaagcctatacctcgatctctgcctgtctgcctttattttctaattttcaggctatccgatatagggcttcaagtcctatatcttcctcctaatgttggtagaaagctaatatctctctgaaaatcttcagtgtaaccaaagacttacttattcgcctgcagtatcagtaaatttccccccttggtttgtacaaattactgtagcaatcaagatgcatgcatcccattgttctttgacatttagatattacaagccttggatagttttttaactaagacagcaaaatcttttcacaaatgagttcacttcagggagaaaaatctgttggcaagggagaaacgataacttgtcaaaggcatgcatactattttttttttttttttttttgctaaattcatgttttcccttgtcaaccaatagatgagcataaagactttcgtaatattcgtttttttgtgattcactagcgatatcattatgatataatattctcttggcaataaggaataatttacagatcctggggatgaggtttttaatgatggtgctttaggatgttgactcatgcacatctttttctgagttaaattcttacatctttttaataaagtaaaatcaaagtaccatgcagtaagtgctctggtgctctctcgaacgtccactgctcccctccccactgtgttgcagtctagtgcttcaggagttgactgtaagtccacggatggactttgagcagtccaagccatccaccaggagaaggctttccctcctggtttagaaattaggaactcaggtataacccaatcagaacatggcattccgctggccacctgagttggttctggaacaaacatgtgatctcatttgagccaataagatatttaaggaagtccatgggggctccttggaaaagtttcctttctcctaagggatacccatagaaaaagccagtctcttggcctctagacattgtctggcccaggatgtcaggcttgcagtaactgtagccacttcaataacacccagagaatgacactaggatgcagaagaggactgagacaagagaatatcagaaaagaggagctgaaactgctagactaaaccaacctggagccagctctgcctttgggtgttgttacacataataagaaacacagtttcttattatgtcagccattttgcatttctgtcactgtagccgaagcatcctaaccaatactgaccacaacgatttcctcaacataattcccactttaccatgatactgtcacaaaaggcttcaataagtacctcctcttcagaaatgagaccatcagcaaccattcaatttcatgaactaggaaactaagacccaaatcaaaaaaggcagatgacttaagcttacccagaaatatgaccttatttgggtttcagctttcttgctttctccaagaggatgtctaagtcacagtcaccaaatatgtccaaagagggtttctaaagcattggcagcccatgcagaagagtacaggcattgatttctgttcagcctaaattgaggccaaaatcatgcaacttcctaccgtgggcttattgatggagatgaattctagtcctgaaaccttatttcaggtggcaagcataaggcacttttgttcttgcagatcttgatagagcaatctatattaaaggcatcttcttttcttttatttagtaatttatacgtactcaggccaaatccatgtcccaggtcttctacagctcaatgtagccatggactaaatttttaccaacgggatgtgagaagaagtgatatgtgtaattttcaaatcatgtctttaaaaggaagcactagaatcttaatagttattcagtctggattgtacacatatggagattaatttttttctactttgtatatgtttggaatttttcaaaacttttttttatgattctttaagttttagggtacatgtgcacaacgtgcagatttgttacatatgtatacatgtgccatgttggtgggctgcacccagtaactggtcatttagcattaggtatatctcctcccccctccccccaccccacaacagtccccagtgtgtgatgttccccttcctgtgtccatgtgttctcattgttcaattcccacctatgagtgagaacatgcggtgtttggttttatgtccttgtgatagtttgctgagaatgatggtttccagcttcatccatgtccctacaaaggacatgaactcatcattttttatggctgcatagtattccatgttatatatgtgccacaagtcaagaaaaacaaagagaaacttgctttgacatattttaaaacatgttataaatccatgtaaatggttgaattttatacaaaacaatgaacaattcagccagtcaaaacagaagtatcactgagggaactccttaagctaacaaaatatttgtagaaaattgatagcatcacaaattgtcgaaaaataagaattatttaaaaattgctaagaaaaagggcaaactatttgaacacatatacaatgataacccccacccgccattgcatgagcataagacacataggaaatatgaaggaaaaaattgtctgatctcaggatcaagatggatcttatatccatcaaacaattaacataagccacaaaaatctacaatatagttttctttcaatgatgtacatgatttaaaacaagtaaaataaaaatgtacataagaaatcaataccaaattttcatagatatcacaaacgatgttaatgctctagggagttttgaaaaccaatttactctgattttcctattggaaagttcatgttcaaaaaatccacaagagaagaactgcaattgccaatagcataggacaaaaatttccaaattaccattgatcaaaacacattatagtatacatgaaatgacattcattgttgtgatatacacgatagctcagattaaatgacacttttatcttgccaaacagagaaaatgttttagaaaataacatccagtactcatcagggtataataaaatgtccaattttgtagccccaaaatagcaaagcagtacaacctgtcaggattgcagtttcacagatcccttaatagatgaactctaggtattaaaatgaagaaaataattaatagctaagtaattagttataaaggagaatgctcaattcagtgctattttgatagcaaaatataaaaaataaggggaaaataacacaatagtgttacagaatagtatacgtagaaaaagatttagttaatggagcaatgtgtatttaatcccaaatttgaagtatctatacaaattaaaattaaagtgatttttgaaaatgcaaatatttactaagaatgagaaaaattttaagaatttaagaataagaaaaatttactaagaatgagagaaattttaaaatgttgaaaaataacataaacatgaaataccagacacatgcacatgtatgtttattgcggcactattcacaatagcaaagacttggaaccaacctaaatgtccaacaatgatagactggattaagaaaatgtggcacatatacaccatggaatactgcgcagccataaaaaatgatgagttcatgtcctttgtagggacatggatgaaattggaaatcatcattctcagtaaactatcgcaaggacaaaaaaccaaacaccgcatgttctcactcatagatgggaattgaacaatgagaacacatggacacaggaaggggaacatcacactctggggactgttgtgggatgggggaggggggagggatagcattagaagatatacctaatgctaaatgacgagttaatgggtgcagcacaccagcatggcacatgtatacatatgtaactaacctgcacattgtgcacatgtaccctaaaacttaaagtataataataataataataataataataataataataataataataaaaagaaaaaccctatgataggtcaagactatttttaaagaaagttgattattttctatttctttcccctttctgccggctggagtggggacgtggtgctgagacagctttgaccttatggcctagggagggactatagaagatggtgaaaccatcagaaaaaagaaacctgattcttggaacacgttgaaggcaaagctacctcctggagcattgattggcctggaattctgcagcagagacacaaaactttctattgtttaaaaacatggttatttaagtctctattaaagttaaaagatgaatatcagaactaatcatcaaatttctccatccctcccaagtctaggagtaccaaaataatttcattgtgaatgatgcctaaatgacttttgcctccacttgctactgtaggactgtggccaacaatatcttcaagattttccagaagcatcacatgtgtgtacaaacaagatgggtcagctcacctgtcagtgactacatgctatctctctatctgctatttgttcctgaccctcctgctcccaactccttccactgggtactgctccctccccataggcattctagctcagttgaggcacagaccagagttacagagttctgttcaagataggagagaaagctcctatccctcttttgtgttaaatcctactaggggtccccacagcagggctgcttgagcctaatgcatgccagaatgcttctctggcatgcattagggctcaagagttacttctagccctgctcttctcctgggttctaaggcatgtattcgatgggacacagaagacaaaaccagtcaagagatacctccatgttttattttgcatcttttttctgataaccaaggctttgcctctgagtccaacttgtctatttcattccttcttccctttgatgcattctctcccaggaagtcactcatttcttttgcaaagaagcctttgggagagtcaagcctaccagttggccaggaatccccaaaaatgagttacaaaagcaatgagaaacactaaaaatagagtattttcatagtagaaggaagaatgagcagacatcaaggagggtttgtgtgtttgaaaaggatgttcccttgaatatcagtcccaggtaacattcaagaaaaaaggggccagatatggtggctcacatctgtaatcccagtactttgggaggccaaggtgggaagattgcttcagcacaggagtttgagaccagcctgggcaacatagcgagaccctgtgtctacaaaataaaaaataaaagaattagctgggaaggataacatgtgcctgtagtctcagctaatagggaggctcaggtgggaggattgattgagcctgggaggttgaggctgcagtgagctgcgattgtgtcactgcactgcatcctgggtgacagagtgagaccctgtctcaaaaacaaacaaacaaacaaacaatacaaacaaaaacaaaaaagaaaaaaggttctatggccaaattagtttggaaaacacaaataactgtagttgtcacttctcataccccctagcccttcacagtgcaaattaacccaatacaatcttggagaagccctgcaatagcctgtttattttttgtttgagccatgatttcttaggcacatttgagcacagagtctcctcttaggcccttgcagtacctattaacattttgggaagcacccttgggaaaatggcagttgtgaattggagccctcgccctttcaactctttgcattgtgattttggggatgagaaaagagtgtgtgtatgcatgtgttaagctgtcatttgaggtgtcagtggttggcttcagtagcagcattaatgtggcagctctgagtggcatattcctccaagcagaggaggacgggaacaggtccccagggctgggaaacacactgaaatatttcccccaccgcatgccagggtttcaataccaagaaagttgccagggtaagctttggcacaaacagcccatcagacagaattgctcctttttggaactgaggaattcacacccacactgaggctggcgtgggcacatgcctctcccagctggtccctttggaggaatcacagcttccagaatgtttgagctgcttgagagatacaagaatctcagagatgcagcgaagctgttcttgaaacaacacaaatccatgtcaaaggcattttaagagagaaaatgaagcacctgaacctccaagctctcattggagaggctgtggaaaccagaaactgcagaaggatcccacaggaagaattaccccgatctacatgcctgtatttggccactaaatgtgaacactctgctaaacaatagaggcacggggttttctggtcagaaagaatgatgcaaagagcaaggcaaaggctggcaaaagcaaatgctttctcccctgcgcgtcatagatctcccaagacatgtgattctaaagaaagcttaattaaatttaatggacaaaactctctcggtgctaggaagcattttaatgtggtatttcggttctgggtggacaaaaatcagtcttccttgcctcactgctctctcctttaaatgaaacaaacttcctgattagtctcataactctcatgactgccccgtgtcctcctgtctgatgatcctctctacaggacacctgaaggggggcttctcactgaatctgcaggacactggcctacataagtcagaagagagcatcccacaggaaggagagtggcatcttgaccaccaagttacctctagtatccagcacagcatctgatgcaaagaaattttttcttttcttttctctttttttttttttttttgagacagagtctcactttgtcacccaggctggagtgcagtggtgcgatctctactcactgcaacctctgcctcctgggttcaagcaattcttgtgcctcagcctcccaagtagctgggattacaggcacacaccaccatgcccagctaatttttttgtattttcatagggacagggtttcaccatgttgcccaggctggtctcaaacccctgagctcaggcaatccacccacgttggcctcccaaagtgctgggattataggcctgagccaccactgccagctgcaaagtatatttgatgaataaatgaaagcaagaaataaataaagaaggagagggaaggaagcagggaaagaaaggaggaaagaaaatatattagagctgtagtgagagaaagtgtctcaggcacagcctcatgagacagcaggaaggtgagactgtatttatttatcagacggcactaacagaacggcagtactcctattttgatgaagtaatactttttcccatcccctattaccctactctccacctcctctgccatccctgtgattcagagaaactgactccactcccaggtggatctgattggctgaggctaactccaccctcttgccagtgattggttcaggaatggttgtatgatccagttgggtcaatagaatgcaaagatggtttgctaggggtttccaggagtgatcttgctctgaaagagcccccagaagtgaatcttccttcttttgaggcccaggaagattgctatcttgctgctaccagactgagtgtgagaccgacacatggaggagagtggattcaagagaatcacaggaggtagatgccactggatgaaatcctccccaaagcccatctgactccttgacttctagttatggttcaaggtttctgggttgatatttacaaaaagagattcttaaaaagaaagatcttcaaagagctacacctagctctgtttctgactgtgtgaccttgagaaagacacttagcctctcagaaccgcaatctgctcacagctaaaatgaaggttaaaaaagattactatctcaaacatttctcacagaatttttgggaagataaaatgtaaagtaactgcaaggagttgcaaatctcagtaaagatattattatctttattagatctgattttcatttttttctatctccctagtctgcccactgaacaatgctaatatttgataacttcagtctacatttaacttaatcatatagtactgactccaattcaacctgtatagctattatttccacctgcccacttccaaaatagatttggggtagcttataataaaagcccctggccaggcgcggtggctcacgcctgtaatcccagcactttggaaggcctaggcaagtggatcacgaggtcaggagatcaagaccatcctggctaacacggtgaaaccctgtctctgctaaaaatacaaaaaattagctgggcatagtggcgggcgcctgtagtcccatctactcgggaggctgagacaggagaatggtgtgaacccgggaggtggagcttgcagtgagcagagattgtgccactgcactccagcctgggcaacagagcaagactctgtctcaaaaaaaacaaaaaacaaacaaaaaagccccaaaacaatagaacaataaaaaagaattcaaggacaaaaatcaaataagaaagctagggaatcattgtcccagaaaatccaaatgaagagcttctctaactgagctcaaaaacttacttctgagcttcctgtcaaccaaagcgaaaagggaacttattttaaaagctaatatcatgctaagcattgtgccaggctctgtgaaagttacaaaaataaataagacatggctcttgctctcaaagagtttgaaaaataatgaggaaaaaatccaccagtgaaagtagtaatataggcatattaggtacactacaagcgttgttaattaccacctagagaaaatccatgagggtagtgagaggagagagattaattctagctttggaaagatttgatggaagaaatagtatttgaagtgggccttaggtggggtgggaatctaattgggattgtggaggggcattctggcatgagcaagcataacagcatatttaagaaaaggtgagtaatgcagttggtctgacatggtctagggtgtggcatgtgtgtgtgtgtgtgtgtgtgcgcacacatgttcttttgtgcacattagggagaacaggagataagattggtgaaagggtttgaggtgagttatgacaacccctgaatgtcatgctcaggaatttgaactttattttgtaggaaatgggaagtcactgagagcgtttcagtaggaaagtgacataatcatagttgttcaccaaataatatatttttggtggtgtttcccccccagagatcaaaattgaaagtgtggttctgctgtgagctaatatatttccatcagaaacttagccttctcctgtgccattctgtgttcacttgcaatttttcattacattgattctaagtcagttattcccagagaaaagacagaaattcatcatctttccctttatgatttcctcctctgtcatcaaacacatcagcaggcatgagttttaccataattcaattcccgccttccacccaccttaattacatgcatttccacttgattataattcactggagtattcaagaggatcaggaagttaaatttctcttggcttggcaattcttttgggagagttctatagcaatacacaggacaggaaactcatgaacaagagataggttctgtggcctcgaagcctcagaatttctccacttggcggaaccatagaattctgcattggaggaggctttaggaatcagtgctcgcgatgtagtaatgggaagaagcactgatgatggttttttgccctcaaccagcaccaagaaatttgctttcccttgcccaagataacaaccttgatatcagtcattgccaataaagaacaagtgagtcgaaatttgttgatcactcaggatcagaatccagtgacccggtaaaactcaagtttgctcacttttcccatgaatacttaaaccaccactgcttaaggaatgcactatgtgaacagccaactgatctagagttagagaaatgtctctaaaaggccttccctgattcctcccagctgagttagatgtccaccccacctcctttgtgctctcatatgatgttttgtgcatctctctattgttatgtgacccacacactgttatctaacatttagatacttgttgtacaccatacatttgcatatattatttcattgtctccctaatgaccctatgagatagatattattattgtcatcctgttttaaggatgaagaaaaagaagcaaggcatggttaagtgacttttccaaagtcatacagccaataagtgctggaggtagagtttgatatcacatggtctgaagccaagccttgctctgaagttctttgctacaatgttatcattatttgtttctgtgtctatgactctttactttctcctgactgtgctcccagtgtggaggcaggagaagagattccctcctgcgcattggtttttaccccttctcagttccccattgcccagcatagcacatagcaaaagacaggcgctcaaccaatgaaaggtagctacatggatgaaaacgtgagaaagtcaagtggtaactctttctcccgggactcactggtttgtattgattctatactttaattctggttgaaaacctgtcacatcttcagagaggaagcagaggagtccttaggctgcatctctcctaactgggaaattccctcacaacatcttccctattggtcaggtgatccagatgtgacacatcttcaagactataatgcaaagaaaatttaaaaagaaacagttttcaaaaatacttttcactaagctttccccccaatccatgttatccccagccagatttgacacatacagttttatttgttaaataaaaaggacccatttctgaagccacgtgtccaagtctttgcaccagtgaggatgcctccttgtttccagccacactgtcccacactgccctctccatggcccagcaagggcccagtcttgggatctggcttttggcaggaccctcactcccatgggtgaatccaaaaaaattctggccagcgtttccttcctgttttccctggaggttctttccaagtggtgccctaaactggggaccagggaccggacataatcccagtgcatatatcaggctgaggctccaaggagacatctgacctcagagggcagatggcttcttccatgtgagatacaggaaataccacagctaaagaatgatccattttccaaagaagtccgtgatgaatgacactgagcatctcagaagttcggtcaaaaccaaggtagctggggagtgtctcaacccccaccacgtgtccccaagatgccaggggctttcctggcagagggcagtggccttcagtgtactgcttcactgtttctgtgtgatggcagaaaacccaacatggtagtttcaatgatgacagcagaattcctctcaggaagagggaggcagataggtcttgaggtcctttaaggtcccctgggcacagcaggagtacatggaaaggaggacaaagagaggatcgagtgttcaatccagcaacaaacaggaagctgggggctgggaggagatcaaataaagaaaaggaagttgtcatcaacacagcaatggaagcgggccctcctctaagaactttccagtagtgagaacacatgaagtgctttatttttcttttcttttctttgtttttttttttggagacaggtctcacaatcatagctcactacaaccttgacctcatgggctcaatggatcctcccacctgaccctccctagtagctcaaaccacaggcgcacccaccgtacccagttaatttttatattttttgtagagatgggtttttgccatgttacccacactgggtctccagctcttgggctcagcctccaaaatcctggaattacaggagtgagccaccacgctgggccaagaaatgcttttaagaataatgtctaatgtttccttttaagtttttttgctgagctgtgaggtcattgtctcaaactttcgggaagcacttactgcctccagagccttcggtcatgaggattctggggaagaaagacattggggttgtgcccagtggagtggcccagcacagaaagggggtggtagacacagaaggcaaagtgcagaaaagctgtaggattcagcaaaaactggcattcagattggagatgtctgtgggaaacctgagtcactccaagaatcactgggagatattgagaagaacactgtgtttccctccatatgctggtgagggctctcaatgaaaaaatctcaacagccagtcccagcgggctgggtgacttgggaatatctgtgtagctacatttgaattaaacatgcatgacgtaatccttaaaaatgctatggtcatattttttcccttttaaatataatcttggtaatttttctgagaatacaataattttaagtctcttttagaattccaaaatgcccaagggagggtggataagaagtgcatttgtatcttttttttctctataagaaaattcagtatttttttttttaaggagaaattcttgacttaggagcatcttggtttgcttctgattgtctggaacagggagtcactattagttatgacacactgagtgatttacaggtcagcttaaatcaaatctgattcatttcacgtctttacttgtgtgtgtggtagggggaacaaacagtataaaacacagagctgagaaacagaagtcaaagttcctgcccgggagaaatgccggcatcacataagggggtcttctcgtgcttagccccctctgccacgtgggctgtgcttagcctgggatgcttgtctcaatgcttgaataccttcctctgcagccaacgctctctatgtgtttgggtggagagatgcattaatggagagaggcaggaaaataaggggtttggagaagaaacgaaacacctgaaaacaagtcatcttttagggttcagatgctcctgaaattttaagagtgaagtgaaaaatgacatgattttcagggactggattttctcttccctctaggactcctcacacacacacacacacacacacacacacaaacacacacacacacagacacacacgcaggaccatccactagcgtactcttacttggctatttgaagtcatttggtgactgctagaattctggactagctgaggctgaggcagatacaagacacaataagcatttcaaaaaacatctcacaatgtgatcatcaatgtgtaatatgagccgagggttagttaaataaaatgtgaaagccgtatcaatgactcttctggctgtccaacattgcatttcattttcctttccaaggaggataagggtagggccggcgaataaattatagatgaaacccccatcatatgtttataaatacactaacattagcattttacttcctcataaatctgcagcaaatactcaggcacaagatagaaagccctgtaaaacaatgatatattctctgcttgcaggcattgactagtggcccattcactcccggtgctgttcttcaaccacgctccctccgctcatgccccgtcatttaaaatccattttaatttaaagatgcacaaggcagtgctcgtggtacatttactcatcctagttatacatcatggagcaaggaaaagaaaattgtttcatctagagatacggttcaatgtggtcaccactgaacagtggagtaattaccatatcagacccactcaaaatgcactcagggtgttctgtgacctatcatttgctaatctgcatagtgaagtatagcttcataactataaattgctgacttaattaaaaccaagacctttctgtcatttaattacagggagaaaggttattgcttaaatgcaattttccaaatgtgatttcttaacagttattaactgcttcaccatcatttattgtttcagatttttcaatttgaaaatacttcccgtgacagaagtaatgacttcatgaaaaactcaatctagagggaggccagccagcccatttgtttctcataagtggagccgacaggaaactggaaaatgtcaccgaaggatcctgggatggctctcactttcggggagcaattaaaacccagaaggttgtatcaaagatggggagaggttgtttgcagacattttaaaggtggtctgtctttcctatcctagctggcaggtgtgtttgccttgtaaaatatgagggtggcagtggtggccagtggtgggtcagtcagctcctaggctcctaggcacccatttgaatgtgtaggtcctcttccgaatatttctgcatctagaatttcttctcccacacaaggtagaactgctacaagtttggacatggcagatagccacacagtgaagagaatagtccaccttttcttccatcctctgtcttgctttaatccttggatggttgtgtcttctctttttctccatgttttagtaggttgcccagaggttatgcaggtaaattagagtgaccagtgaagtgggccagtctagatagccaagaaaatttaacatccaccaaagcacttctttaataacaggggatttagttattgtcttaattcccatgtgcacaaaatggagacttgtgcaactggtcaacttaatgcttcgattcatattatagctccatctgcagcagagaagcaaggaatttcactgtgatggacaatctagtcttttcctagaccctgacagctctgtgctagaaaatttacaaaaatggacaaatgtgcttcctgtctacagggatctaaatgtcggttccaggcaggagctgccttgcttactggttaaggagaacactcttaggctctactttcactttaggatagggttaaagttaaaattgctcagatgaagaagtgaaaatccacccaatttctctctacgttagccatttctcttggctttattcattgtggcagttacacaaaaatgactaatggggatttcataaaatcttagtcagattgttaataatcccttctgctctccagcagcagcgtgcttcaaagttttcaaagcatcttcacacactttaaccaatttcagttcaattaagcaaatatttcggtaacacaaagattagaaaggcactgctgcttgcccacattcaatcaggggaagtcatctggaccttcgtccaattctataaggtagcaaggaagatgttttcaggaaagctgcactgtagcctccctccaccttcttttttttttttccaagaaacagagacacactcaaacttgatgaaattaagtcaaagtgaagctcagctcagtataaatatttagagacctcaggaaaaccaggaaggctgagatccagtgctactttgtctcaacagaccacatggtccgtcttatctctacttctggctttctgctcttacttttctctttcttgatcatttccccgtctttctcatttcacacaaggcagcaatcctcacttctcagtttgaccatgcaccactgtgatattgtgaaatgtctatttcacagtagatagtgtcagaattgaatggaatcagagaacatcctcctggcctgctggaaaatgtgctgcagaattggttgctggtggagagaaatccccacccacttgttggtgaccagaggtgacatgctctatgttgagtggttttggctgtgtgagagcaggaaaaagaccttgggcttttcttatatatctcttagaatcaccaatggccaacatccttgtctcagttcaaattcctggaagaggtaatctggttgtctgagtgcttcactctttagaaactaacaaatcatgggttactggctagctgggcctttggacagggcaagcaacaattgacacatttaagatggcagataaaaaattatgatctttatttgagaggtaaggaaactaaatcttgccaggttaagcaatctgcaaacgttcgcatgacgtttatgcagccgagtcacatccacattctctccctgtcagttcctttcccgggagctagaaatattgaagtcatttaagtaggagatgattattagacatatacgtacaactataggtttttgtatttatgttttattaattgacaagagtacaaatctaattaaaggagaaattgcattggcttaaaataagagaataaattatttctttttggtagttaatacaactaaagctctcatttgtaccctatcagttaatctgttgactattaatatcacttaatcagaaagatggtggaggagagtaacaatgactaatacacagtcaagattttaatttggaaacagaacactacatctttttacatactaaatgcacaatagtgacaattaatttcattcttgctgtgagtgctttatgtagcagccacctattgggtctaaaaatctggctctatcatgaatgggatccatgggataggatggtgccatagatgacttgctttgcttctgggaagaggaaatgatttacattcctttcacactatcaccaccaccactaccagaaatgagatggttttgtagaaacatcaccatatactttgtaaaatgattggttgctataaaacattgtccagggtggaatgcgcaatttgcaaagaggccaggggaagaccatttctggatgtgtatgcagctgacttttgtgttagtggacaccccagtttggtacaccacattgaggcctgatagcaatggccacaaacacagcaagccacaaaccaacccttgctcaatcctgcaatttaaagagattgctcattcaaactcactgtagttagacaactacactgattctagaccaattccttttccctcaacatgtcagtgtcgttttttgtttgtttgtaacagcttttattactcacataccacaaaattcactcatttaaagtgtacaattcaatggcttttagtatattcagatttatacaaccatcgccacaatcaattttagaacattttcatgaaccacaaaaagcccctgtaccccttagcagccacttcccagctctcccaatcctaggtaatcactcatctactttctttctctaattatttgcctattctggacatttcatacaaatggaatcataatatgtggcctttggcattggtttctttcacatagcgtaatgtttccaagattcatctgattcatgttgtaacatgaatcagaacttcatttttttaaatgactgaataatattccaccatacagacatgcagttttatatatccattcaccagttgatggacatttgggtagtttctacttttttggctatcctaaataatgctgctgtgaacattcatgtacaagattttatatgaccgtatgttttcaattcccaggagtggaattgctgggtcatgtggtatcttggtcagcttgggttgctattataaaataccacaaactgggtggcttatcaacatcagaaatttatttttcacagttctggaggctggaagtcagaaatcacactgacgtgatcaggtaatggtgagggttcttttttgggttgcaaacggccctcttctcattgtatcctcatatggtagagagcagacagagagggagagaaagcaagctctctttcctttttttctaagggcactaatcccattcatgagggctccactctcatgacctaattacttccccaaggccccacctcctaatgccatcacatcagggtttagaattttatcagatgaattttggagagcagacacaaacatttagtcacagcatatggtaactcttatattattcttttgaggaacttccagaccattttccaaaatggttgcaccattttatatcccaccagcaattcagtatcttttaataagtggattttagaggttccagcagcagctctgtttatcccctggcctttttacactctgggaagctcataaaatagcctttatgggtgctgagtaagacaggtacccagaatccctccacctaccaagagctttcagaaggaaccttaaagagtgcttagtccaatgtttttcaaagtgaattcccaggaacactgatttcatggaatgttactaacaaaagaacatctcttccttttttaaaaaaaggtggttctttgctcagatgtatttgggaatcactgggttaaaccaacttaaacggactcttttcttcaggatttctcagagctattaatatgctaatgtatacaataaatttccaaaaggcaaattgagagtttctaagcaatatttatttgaccgtaggttgaaagttgtcccccatctgggagcaacttccagaaattataatcctcagaagacactgaaatgttgatctggtccaatcccttcctgtggcacctgccctctctcaggagctcctaatgatcacaatcttctttgctaccatttaccaagggtctgttatgttaggtgcttcacatacgttaatttgaatgatcctttccaaaattacctcaaaaaagtttaagaaaaaatcctttaaaaaaaaaatgggaatgatgttagtcccctctcacagaagactaaactgaggctcagagaagttgagcaactttcctccaaggtagcacaactaaacggtaacagcacctggacttgaatccaggtctggctctcttcaaagcctccattttgaccactacactgcatcctggggactgcacttcatatttttctgctggatttgataccaatttaaaataaggaagagcaggggcaagccagaggccaaactagaaatttaaatataaaggtcagtaaataattgaactattctcaagagatagcctaggtattggcaagactattacctccttagactcatacacagcttcttacacacacacacacacacacacacacacactcacttggactaattacctgtcttttccaaatggttgtttaatccattagtgtaggttttttttttttttttttttttttttttttttttttttcaaccagagcaaaaactaagtactgggatatttggagaaagcagagactagaaaatgcaaccaggtccaatttaactgcaaaattacttcctcacagagcaaaatggctggctctgacacccaagctgttcagtgggacataatgggcagagtgaaagaggcatcaatggctgtggcctctgaggatagtcacaaattcctctggattgtagttgcctcatgtgtgtaacccttaaaaatccaagtcaccatgtggcccagtatctgcaaagaaacacaaattcaacatttaaaaaagtaaaaccattgtaaatactgtctgcagtatcttaagagtgaaagtgagaaggtacattaaaaacacataataaggctggacgtagtggctcatgcctgtaatcccagcactttgagaggcagaggcagaagtgtctcttgaagccaggagtttaaggctgtagtgagctatgattgtgccactgcactccaacctgggagacaaagtgagaccctgtctcaaaaaataaaataaaataaaataaaataaaataaaataaaataaaatataaacaaaaatggaacaaaacgtctggaaatgattttttccataactcctcctctttctttccacctctcacaagtacaggaggggcctcaaaggtctttccttccctcgctcagaggaccccgaaagactctgtctagagctcacaatttaaagaggctctttcttcttcttcatccttctcctttccttgtctttcctgtagttccctatctttcccaattgaaatcttgcttccttgctggcttctctgctccccccactcacctttacctccactgacacagtgaaagctgaggcatgtaggtgatcaggagtgtacaggtgtgtctgtgtctgtgtggcgtgggggtgggtgtaggtaggaggtggtgggggtatacagtgagaagatcacagataatgtaatcaggttgcttctggtcactgctaacattgtgatgtgtctgaacagaaatccaactctaaacaaatatcttgaaaaagtaatatacacttaaggctcccataggactaccaaaggggagaactacatagcatgacctccagccagtgttgtagtgagtctctcagcagagccaacttagcctgacagctgctcccatttctggccttttggcctccttacaaatctgtgagtcttttttttttttttttttttgagacagggtctcactcttatcacctaggctggagtgcagtggcacaatcatggctcactgtagccttgacttcccaagctcaggtgattctcccaccttagcctcccaagtagttgggaatacaggtgcaagccaccaagctcggctaatttttgtatttttttttgtagagacagggtttctccatattgcccaggttgacctcaaactcctgcaatcctcctgcctcggccctccaaagtgctgggattacctgtgggagccactgtgccaagcctgtgaattattgtaaatgaaggtcttgaattttgtcacatgtgtaaaataatgacgttggactaaactgtctcttccatctgagaagccaatgattccatgagatctgtgttctcaaagtgtaagttatttacaaggggaaatccataccctgaaagagctgaactatggaaaccttgtcttttctgtctcaccagccctaaatcttacgctttaggcagtgttacatgtagggtgaagaggtaccactcagatctgtgagctctgcttttagacttcacctaattcttccctttgggaagaagataatatcatttttatctgtccaacattgccccgtctcacctcttctagaaacagatcttgctccttttgtgccagtcacaacccccgactgtctggtcataatggttgaccaaagaaggtggcgaaatgacccaaggcccatcagggtgtatccttagggatttttctaaatataagctgaggagaaagagtcttttgcatctttggtaggaagctgtaagtatgtaagcctatctcttgggaggatctggtctagggaaatgaagacaacaggcagggagatgcagaaaggaaatgggagagcatccacctggtgacggagctcctggatcccagcttctccaagctcagctccactctacgctttctgcagtttgagtctgtgaattaatgaggcccccttttttgcttaagccaatttcatttgagtttgggccacttacatccaaagagccttgctactcagtgttgggatgaggagttggcagttagaatctgcaaggggcttggagattccagggacatgctatgccctcttctatttgtttgcaaagtgtagcaggactctaactctttattcttgtgtcctggccttttctggatgcttaaataaaatatcaaataatcttgctatcttccatctcttctctgtccagtttgtggaaagcaacctctgcctgcttgtactgggagcagctcttctagatgtcattcactggcactcctcaatcagagagacctttgtctacaggttaaaggacatttgtaactgccacaaaatgcaaattcagactgcttcccttcactttctggtagtatcaatatttgcatttcttagatttccatattagccacaaaatggtctaccagtttaaagaaggtagaaactgcaaaatgactttttaagaccaggtgatccgacagttcaaaggcattctcatgcatgcttgcagtccttgaaacatatccatatagtattgtttttaattatttgtgcccaaggagtttttgtttttgtttttttgtttgtttgtttttaatttaaacaagaaggtgttaaatcctctgctatctggggagaactgcagtgcccaaacacccacccttctctttctcttggacttcagtgttattagatgaggtttgggaaagttttattagcactttttatcatgacactgggacaggagagaaaatgaattcaagctctaccagggttccagtgttaaacttggaaggtgctcacggccacgctcagccttactgtaggatattacttgagtgagtgcacaccctccccacaaactgaagttctactacacgccttcactcatctcctaccactcttactgggttgcatttcagcctcactggcctgctttccttccttgaacttgctaaatccacttctgacttaggatcttcccaccatttcctttgcccagaatgttctttctcccctggctccttcatgatactgaggtcttcagcataagcatcatatcctcaaagaaaccttcccgtatcaccctgttccaggcctttattgttgccacaccaaaacagtggcttaaacattaataattatttatttggctctggagtctgaaagagtgagatctcagcttaggagttctcactccaggtctttcatgtggttgctgtccaatgggcatcttgaagttttttccatcatgtatctgggctgggaagattcaaacatctaggtgctggcactgctagctgctcaggtctctctctctctcattcctctgaattgtctgtccacatggagacttcatgatagctggacttcttacattcagctgaaggcacctagagtgaatgttccaagaaaaatcagcagaagctgcatggccttttcaaactgatagccacttcctttgtgtcctattcttccaggtaggtacagaagcccctcaggtgcaaggggaagggacatagactctacctactagtagaacagtatcgaagtacctgaagacttgctttaagaccaccacacactacatactttataaaacagcctccccagcaccatatcacttcactttattataattctttgcatagcccatagtgctatatgtcatattttcttatttgtttattttctctctagcccccaaaagaatataaattgtgaaaataggggccttatgtgtcttattcaccactgtatcctggtgttcagtggagcagtgcctggtacttagtagacaataagtatctatcaaatattaataagtgaatgaaggataaatggcaagggctattctgaagggtcatctcactgagattgttactgtgggctccattttggatgacgatggaccctcctcaccctcctttttctacttccttctttttacctcccttccctctctcccacaaaataatttctaatcaccgatgtcagtatttcaaacctggagtccttagtataattgtgatccattggattcagcttttaccaccttgtttttgaaaacaaacataccaaagcatgccaatttcatcatttgggtatgtcaaggatacttacacaagcctgcacctggcttattttacaaatcacagattggcttgaatctgtcttttgtttcttaggattttttggttggttttgctttgtttttttgctttccttccagccagataagctgagatctggtctgtttccactgaggggtagtcatcagtctacccttctcaacatttctgttcctgagatttagctacagacttcacaagctgtaacattctaactacgtgtcattgccaccattgtctcttgtcacaatcctaattctatgttctgataataaaacttcattagtgtctgcacctcctttcccgtacctttgaaacactgtcttctgctgaaacgattagcagtgcgctgcgtcagatcatccggctgtctgacagccattgtgagtgagctaaattgtgagaaaatgaaaatttctgacaatttccattattgtcaaatggagatatttacttgtacaaatattaaaggttatttaaagatgtaaacggacttcatttcattagtggtatgcatcaggtaataatttaaaacaactacccagcctcattcaaataaattaccaattcattttctgaaagaaaaatgtcatttctccaggctgtgtttttaactgcttgcaatggtagaagattaaaaaaaaaaaacctatgaatatttcagaacagaaaatgttcaagttctcatattgtttaacataaaccagacaaagggctattgttctgaaaacctgactgagagttgcccaaccagaggagacagtgaaagatcaatgacatcaaaatgggctttaaaaaaaggaatagtagcaatggtgattacatcttcctgaattccagttctagaacttcactagaaaaaaatcaggatgtgtggaaatacttatctacaaggatgttcatcccagtgttatttataatggcaaaaaaagaaggtaggaaatgaaaaaaaatatgtatacaaggctaagggattgcaggtgtttgagaccagcctagccaacatggtaaaaccccttctctactaaaaaaaaaaaaaaaaaaaaaattagccaggcgtggtggcgggtgcctatagtcccagttacccgagaagctgaggcatgagaattgcttgaagctgggaggtggaggttgcagtgagccgagatggcaacactgcactccagcctgggtgacagagagaaactccatctcaaaaaaaaaaaagactaaggaattggacaatatattagaatacagccatatgatggtctggagtaaagatgattaataaatgtattgtagaagaattcattataaataatatgtaataaatagggcacggtggctcatgcctgtaatctgagcacttcggaggccaaggcagaagggttgctggaggccaagagtttaagaccagcctaggcaacatagtgagacagtctctataaagaattttttaaaaattagctgggcatggtggcgcacacctgtagtcccagttactcaggaggctgaggcagaaggatttttttgagcagaataattctaagatgctgtgagctgtgacagtgccactgtactccagcctggatgacagagtgagactctgacacaagaaacaaaacaaaacaaacaacaacaaaataatacatatactatgatatcatttataaaaagataaacatctatatttgcattgacatggacgcagggaggggaacattacacaccggggcctgtggcggggtggggggctagaggagggatagcattaggagaaatacctaatgtagatgatgggttaatgggtgcagaaaaacaccatggcacatgtatacctatgtaacaaacctgcacgttctgcacatgtatcccagaacttaaagtataataataataataataaaaaaatcttggtgtaatgttggacaacaaaaaaaaaaaggaagagaaggactaagaagaaatagatcaaaatgattacttggtagtgggatcactggtaagtttttaattttcatgggtacatagtagatgtatatatttctggggtacacgagatgctttaatacaggcatacagtgtgaaataatcacatcatggagaatggggcatccatgccctcaagcatttatcctgtgtgtattacaaacaatccaattacactcttagttatattggtgatttttattcttgtgcttttataatgagaaatataccaataatccaataaccatttgcaactcgatgttagggcaagttatccttgcttagctgggtcagctcctctttccttctagtgcaatggagaatactcctgggagactcggtgcattaatgctcgtactgtgggtattggcaaaagagacatggagcgagttggtctaatgttatacaggaaaatgtttatgctttcaggatttggcaccttgaggtcagtcctttccattatgaccttcaatattacaccagtaaaatattctctaatttgcaaattaaagtatttcttacaaaaccctcagggatgaattagtaagtgcatcacaaccctcctctacctccttaagcttcaccctcttctagaaaataatgtcttataaaagatgatagttttctcccttttaggaagtcagggctggtaaggcattccaatggttagggatttcagcaatttctatctcgttgctttgctcagcacattgattcctcttcatagtccaagctccagccatcatagaacattccagccagcaggaaagcagagaggaaaggggggcatgccccaaggtcatggggcaacacttccattacacccattgtccagaagctggtcatatggccactgcaagggaggattctggaaggctgggaaatgtagtccttattctatatggctcagctaaaagttggcatccaatttttaaggaaaaaagagaaaatgccctggagagcatgcagcagcctctgccacaatcatacatgtgggcatcacagggagacatgtgtcagagaagacaaaccaagtgtaacagttttcatctcttttgcatccactcaacctagaaagcatttcctggtgctcacatttatttgaaaacactctatatactacagaattctgagatgtggcctctggggaagaaataaaacagctgcagcaaataaagcagatgggaattaagaatgctggaggagctccaaaatacaatcccattgtccactaagtgcccaccctacaaagaatgtgctccaaaatagaaactttatgaaactttgaagcatttgattaatgtaagccttcatgaataatgcaaggctgtgtgccagggtttcatgtgaagctgagagaggagaaagattagcatgcgcattttggctttaaagaaaattaagaaaaattcacaaagggaactcaagcatttgggggcaagaggtgttgccactaaaatggcttctgcagacatgccccctgcagtggtggaggggggcgggtgctcagcaaacactggctggctcgccagggagattccctgccacagggtaggtacggttcaccctcctaagggccccccaggtccagtcctgtatgcagttgggtaggacagtcagggccagtcatgcatgtggctgcaggcaggccctgaagattcctctttcccctgaaaatatctttcccacctacaggtttctggaactagatcttcctccctcagatattctttatgttaatgaattgtcttctgtagaaatgcaaagatcttttggaagggctgtacacaggtatcgcttcaaaatacaaccctttctattctgcccctaaaatgtgttttacacattttattatgaaatatttaatactcacaaaaggtataaagaatttttcatggtcataagttaaaagcgaaaaagaatatgtatagtttaggaactacctgagtacacattacccagcttaatatataaaatattatcaatggagttgaagcccctttgacttccccagtcacatttcctttcctgcccctaaaagtagctgccgtcttgaatataatgtgcatgattcccaagcatgggatgttgcaggaatttatgatctggccactcacccccatacatcctgcccttctactggtttaggccattatcatttttcaccaaagccattcattcagcacacatcaaacactactctcggccaggcaccatgaccactgtttcctacctagtatccttgcctccagtgtttctctccatccgatttacctcccacattgcagtcacaatattatatctctgctcaagaacttcatatggctccctactgcctatatgctaaagtccaagctctttaacacggcatccaattccatgtgaacacattactagggccactcccagagccttggaagggttagggtaaggattaaggtggggttagggttaacactaatttcacagtaaatgggcttctgtacacatttgcatggctgcaataatacattcctgtggtgtgtcttctcattttagtggaagaaattgaacagacttgttcaaatcacagctctgctttttgccagaccttgggcaaattgctttgtgcattagtctgttctcacactgctgtaaagatattatctgaggctgggtcatttatcaaggaaagatgtttaattgactcacagttccacatggcaggggaggcctcaggaaacttacaatcatggtggaaggtgaaggggaagcaggtacttgtaagacagcaggagagagacagcatgaggtggggaagtgctgaacacttttaaaccatcagatctcatgagaactccctctctatcacaagaacagcataggggaaactgcccccatgatccaatcacctcccaccagatacctctcatggcatgtggagattacaattcgagatgagatttgggtggggacacagagctaaatcatatatcaatatcactttgcctcttcgagttttcatttcctaatagagataagcacatctatgaaagagactgttaactaatcaccaaaatcccttttgtccttcttctataggtctaagattgtagctaagatattgctacccaggtaaggaccatatttctcaaattcttgccaagtctgggatttgattctaccttactgaaagctaatatgttagcttctgactgtttcactggtgctaatggaagacacaagacccttaggtcagagacaaaggagtttagtactcatgacacatcaagcagcaggaacatcagcatatttgcattggttcttcttgccctgggtcttatgggggataatacaatggccccagatggatgttatgcatgcagagtgtttgtgttgcaactgaggagcaccaagcttggggaatccatcacttttatagtaagcaataagcaagcctattcattgtccctggtggtgtgtgtgtcatagggaaggataagtagatgtaatttcatttcctaaggtaattgtctgtataaacaaccctaagaaatagccagaataaaagagcagtgagatccttgaagttctggtatattcagcaagacatgtaggaatgcaagaggtccaaggaggactctctcccaacagctcttttgaaacttgatatggccatgtcacttagacttctgcattagaatatgaggggcaagatatgtgtcccttgtgggaagacaccttaaaacgaggctatgcctcatttaattcctctttcccctttgtgtttgctggttaatggcaatgacaagagagattttggaagacaagtgttgaaaaagctgccatcagcctgagtccaggatgactgtgcacagaagggttgcccatcaacttagaacattcacttcaaattgtcacgtgcgtgagacatacactttttattctgcaagctgtctggaaacgtcatttgttacagtgactcagtatatccttcactaataaaacatctcatgcagaagggttgcaaggattaaatgaaattccaatggctaaagtttgtgcacagctaactctgggccagggtcttgctaaaagcttgagtgtgttatttcattaaataattacaataatctttcaaagtaggtgtcatcatctccatttcataattggagatcaaagacattaaaaaatattcttaagcttcaaggatgaaacagtagcagaactgggaccaaattcagggctgaccaatgccaagcccatgattgtcttcagtgtgccacatgttttccagggtttcaattttaggttccaggttctctctctttctccctctctctcttctcactctctctctttagccatcccacctaccgttgatccctcctctcttctttttctctctccttccgccatttcttcatattgaattatattttcataccagatagcatactggaatgcaaaaaataactccagtcaggagctctgatttttggtttcagcttccgcaaatcctagctgtgagtacttggtcaatcatttaatcgctctgagcctgagttttccggtcagagtaaaatagatagatcagtaatagttgtcttacctatcttacatgatagccagaaggttcaattaaaatacattgcattgaaagtctttacaaattgaaaaacattctagaaatggcaggtgttactctttacccccatcccatatgccagtagttcacaaagtatagtccctggacagcagcatcagcgtcactgggagcttgttagaagtgcaaattgttaggctccacccagacctgctgaattatgaaatctgggggttgggtccaggaaactgtgtttgttaagttctccaggtgattctgatgcacactgaattttgagaaccactgtcacacatgcttggacatacgttcacaggcacacacactcatattcaggtaaaatcaagttaaaataaatattaaataaaaaagaagccatataagagctgcctgtggatggtgtttgggagaaggaggtagtgagccgtgctaagaagaggcttgggaggaaggagtgagatatccttgccattgcaaggataagtgtcaggcctcttagttcagtggaatttctctcctcttcctccagagttggtgctgtgagccccactatagcaactggatgaggagcaggaaatgtgggtcttaaggaaataactcaatatttttaggattctttccattgtaaataagagaaacccatcacaaacagttttggtcaaaaatgaacacttatcggcttacaaaatttaaaagtccagaggtagattggcttcatgcataagacagattctgggtctcaaacgtcattggaatctatttctctcattgtgctggctctaattttccctgttattttcatcactcttggggtcttctcttgcagtggtaaaaatagccaaaagccttctaaggcccatgtttgatttgtttagccactcccatataagaaggagtgactttttccccatggttccaacagaaatcctaggctgactctctttgatcctgcttggggcactggaccaattaacatgactctgattggccagacctaggtcatccccaatcctggaatctggcaaggccacacgaactgggtcctgaattatctgatagagcagaggtatcttgaactgctcactttaggactgcctagtgagagacacataacatttctcttttatttaagccagtgtgtttttgggtttctttgttctagcagcttagcctgcatgctaacataccctgtaccaaggaagcagtgtgggaaaatggactgattatttagagatctgggatctcattagttctacaatttgctgtgatgtgaccagtttcttcttgtgtaaaataagccatgcggattgaatctgggatgcaggaaaatggaattcatcttgagcagaatggggaaaataatcgtatttacagtcactcctctgtatctgtgggttctgcatctgtggatgcaaccaatcatggatcaaaaatattcgtgagaaaaacaataaaaaataacaatactactataaaaatggtaagaaccaatatagtattacatctatttacatagcatttatgttgcattgggtgttataagtcatgagacttacatagagatgatttaaagtacacatgaagatgcacataggtgatacgcaaatactacgtcactttcaataagggacttgagcatctgtggatttgggtatctgtaggggtcctggagctaatctcccatggatacagagagaagattgtacttcatagggttgtgagaattagaggagctaatgcctagggcctgagacacaacagatgccctataagtatgaactatattcattattataaggtctgccctgactgactgcaggaggctgcccggaaggctgagttgacaagcctataaatccccaccaggaccacatcagagctcactggaaatgagcaccattgtcagccagcagtgttatccatggacacaggacagggagttccttgtaatggaggaggccccttcccttccaactttagagaatggtatatatttatactaagccagcttagaagtgtcctcttttccccttttccctatactacccacaccaccaggggcttcaggtaaaacacaaacataagagtccctgacagcctttcactccctggcagttcttttctccacccactttctcattttctgggccgaactcttgaatccggagactccagacttatgagagatgcctagacttctccagcttctctttttaaattgtttttacttccctctcgttctgactcaaatctcatctcagggactggaaattgctgtgttaaatgatattgtcagcctggtctttgaaggatgcgtttctaggaccgtggcctccccacaggtccaatcccatttggggtgattctgcctctgctggttccactagcctaagaagttctgggtccaaagaggagcctccatgggggttctggtctgctgagaacccaatcactaacacaatttagaaaataacccaagtcagataatccaaatctgaaatcccatccccaatccctaattgtatgcagggaaatgtcttattttgaccattttcaaaagtcacagaaagtgtggaaatgatgtatgagtgagggctcaattgaagaaaataaaatccaactagtttaaatgggatcgtttgcagaggctaaatccactccaacagccctattcttaaatctttcgattccttcttctatattggagttggcaaactatggcctgcttttgtaaataacactgccacctgtttgtgtaagcaaagcttgattggaacacagccacgcccgttcatgtacatattgtctatggctgctctagcacttctgacagtggagtttagttacagcaaagacctcatggttcacaaagcccaaaacttttactgcctgtctttttttcagaaaaagtttgccaattcctgttctatattatatcaacttcacttagcacaggccaccatcagccaacgaagctaacaactgctcccatacacccatgtgtgtacttactctagtagctctggaagtggcacccatagcaacgacttcagtctgaactgtagttatgctcctccctccatggtctagcatcctccacatccctttccacacccatggataggagagacagatgatttttttttagggcagctgtagacgcatcttggttctcagacagagccaggaatatacagctctgagcctgtcgttttctttctgtaaactctcttagtctgttagttgaagtcagtcagtcccattgtgccgttggcagtagggagtccttttctaccatgaggagaatgtatgagaagtggagacagtacaactggagagcctgtactgatggaatatgggcaccactactcagctccagctaatgattgttacagtggaatgcaaacctgtgttgtcaaatcttctgatttgtcaagagaggctggaaatattgttttgttttgttttaacaggcagtcattgcacactgaggtttaaggctttacttgttggtgatcttgggcaagtttgtgtgcttttcttaagcttggtgtcctaagctgtccagtgaaagaaaggaagaaaggaaagaaggaaggaagggagggagggagaaggaagcaaggaaggaagggacggagggagggagggagggaggaagaaaggaaggaaggaaggaaggaaggaaggaaggaaggaaggaaggaaggaaggaagggaaggactatatcttgtaagggttttgtgacacttatgtgtgataattcatatcaagttctaagaatggagtccggcttgtacagagcacatgatcagcaattgctagcctcctgtttttcactaggcactggaggaggcactagatggggattccatctttcttgtctgcctctattcggagtgaagaatgttctattttcatggcaggactgcagagcccacctggaagagagctccagggtccacgcgaaagtctctagagctccttctatgacggggtgagatagacacacccaaggaactgccccaaacaacatctatggcagacttttgttaggggagagaaataaataagtaaagagaaaaagaagtaaagcaggaaggaaagaaaggaaggagaaggaaagaaagaagaggaggaaaaaggaggggagaaactagactcagtaaaaatcaaagcatagaaacattgtaattaatgtataggaatagactgtagatgtatggtgtaggaatattaaaaaagtactaagcaagactcatgttgcagattataattaataataggtaaaggtatttaagatttattgttaagtttaaaaagcaagttataaaataatgtttattgaatgatatcaatagcatatatgaatttacatatatccaactagaaaaaagactggaaggaaagccaacaaaatataaaaaatggttatctctgggtgacagaattatggatgacttttgttttgttttacttctgtgaacttcctaagttgtcttcaatgaacctgtgtaacttgtgtagtaagacaaaatgggaattatgaaaaataatcattttgattgcgaagccactggttggatagctgaaccctgagtttcaaatactttttcaatcttccagcaggtggcgcaatggcaatgtccgcctccttgggagaatttcactccacaattaacagaatctcagatctcagcccacgccagccatggagcagagggcttattctctggcggggagggggaacttgaaagaaaacactcaaacccagaagctgcccacactcagattgctggccctatggctcagttcttcccacagtaggagagacaaggttttagggtaaatgcaatgatacaggcagaagaaatatgttttctcttcctcccttaccctccctatcccccgtaatttggccctaggcaaagttcaaattcgtctttttggtgggcatttctagattgcattggatttgcagctcattcaagccctaatggtaagtgagagtttgggctcaaaggtgaaggaaaaaagcagataatcatcttatccacaatgctgtatggttagaggatctttaatgtagagcacaccttgtgcatgaagatggtggacatgctggccagccatcggctgttggggagcgctgaaggcaaaaggagcctgtggccgggttaaccagtctaccaggagtgaatgagacagaatctctccaggcttggacaccacaggaggctgggctattcatagccagggtacagccttagcttgatctggaagtgaagaaaccctcagagaagtcagccgcactccatcactttgaattttgttttaaatcttaaatttgcccacgtccaagaaaaccactccaaagggaatccagcaggggaaaagccaccagagtccaccaaaacggtccacattccccccagatccacacgcacacataccatctggaaacaagtaatgctctgggccttctatgctatttctcaaagctcttcagtaagcctccagtgcccttctccgtaatgacatggaagaaaaagaaaagaaacgagggaagaaagaaaggaggggagggaggaaaaggactaccgcagctcatcttggcagaaagaagctagcagactcctccctccttccccagaagttttcacttactgattcatccccattgtgatctagatgccgtcacagaggacctgcttgcatgggggcactcacctaggttttgagaaaagtcaatcaaagcccttgacatacaggagctttctatttcagacaatccagatgatcagaagaaaccacataaaatgacagggaacaaggatctggaagtaactacatgtgtctctcccttcatcctacagatgttcattctaactctctctctctcggacacacacacacacagacatatgtgcacacgaacacacacattccctggggtgctacagtagtagggaatgcatgctatggtttaaatttgtacccaagatttatgtgttggaaacttaatccccagtgcaactgcagtgtaggggggtggggacctttaagaggtgattaggtcatgaggatgctgttctactagactaatgtcactttcataggagtagatttgttatcaagagagtggtttgttataaaagcgagtttgtccctctcttgtgctttctctccctctccctgtctcaccctcttgcccttcaccatgggatgatgcagcaagaaagtccttctcagatgctagcaccttgatattcccactcccagaaccgtgagaaatatatttcttatctttataaattatccggtttgtggtattctgttatagcaacataaaatagactaagacatcacacaataaaaacagcaacaaaataatgaacacatataaggctatatactaacaagtttagcttaaaagttaagcactttggagtccctcggcctgggtttaaagccagccctgctgccttctagtggaacatctcaaacaaattacccaaagtttttgaatcttagtctgtacatccgttaaatgataataataataatggctacaagtcacactattacagagaggattcaatgagatcttgcatatagagcccttggtgcagtgcctggctgtgaccagcactcagtatgtattgactattgctgttttctgaaagcatattgataacggggcagtttgggattgccaggctggagtttgttgatggaaaggaaattttatcaagggcagtgatgtccagtgacaagactgtttggcactgaaatcattttacaaggagcttcagtatgctttaaaatagaacccaacacattcttgccacaggggtccaaagtggctatctgtaaaaagcagtgtgattaattagctgaaagggtcaggtgatcttcaaactaatgaaccaatgtggcccaagaaccaatcaatcagaaagaaccctggctctagagccaaagcagccccctggacatccctggcgtgccaggccccttctcttggattccagggagtccaggggacccagagaagaggatgggcagcagcgacacagatgggcacttggcagtgactacagaccagctgatacagatatatttcagtattttaataacctgcatggacatgccggtgcatcctggctgaacatgagctctaggtcaagatatgaatttcatccaggagcagtggctcatgcctgtaatctcagcactttgggaggccgaggtgggcggatcacttgaggtcaggagttcaagaccagcctggccaacatggtaaaacactgtctatactaaaaatacaaaaattagctgggtgtggtggcatgcacctgtagtcccagctactcaggaggctgaggcaggagaatcacttgaactcgggaggccgaggttgcagacagccgagatcacatcaccacgctccagactgggcaacagagtgagacttcatctcaaagaaaacaaaaaaaaagatatgcatttcaatcccaccccaacctgagtgtttcttagtccattagccaggaatgacacagcaagaaagagatccatggagaaggttcgaattgattcagtagaaagaaatctttccctaattctggaagaacaactcaatgtcaaaatggtacatggttgcttcctattcttgtgtagctggtggaggcttaagtattcagagccccaccttctagctactgagagtccaggagagagctatttccagtgacgatgaaaggatcgcccactagcacacagggatctgctgaggtgggcttggttcacaggggtgaggaagatgacaggaaggaactcctgacctcaagtgatctgccctcctcagcctcccaaagtgctgggattacaggcaagagccaccgtgcctggttgaaactcgtattttgacctagagctgatgttttccagggtgcaccagcatgtccatacaggttattaaaatactaaaatatatcttcaggtgcttgtgggcatggagagaggagacttgggagccagtctccatggttttctgtatgggctttcaacagagaggggctaccaagagaagctggaagaatggtttgcccatacattcttcaggaaaccctgggagagtaaggaagttgtccttcagaactgataagaatgggagagggtgaggggagagatcactccaccactgccaggtggcctcagtatagctgacacagtgtggcctcaaagccagcagcagaatagagccctagcagctgaaagcagcaacagacttgggagtcttattcactgggctttggaggccgcacaggggctgagagtccttgtttggtggcatttccaagactttccccagggtttttcccaaaagggttgcagggctttgaggagggaaccagaagatctgccacagtagggaggaaggctagaggaacatctgtcgctcagtggcaacaacccccatatctggagagcatcctgcaatttataaagcatggtctcattcctaactcttcccagcagagataattattcctgttgtgtagatgagaaaactaagacccagagaggtaaagggacttacccaaggttaatcatggcagagcctattcacactggttcatcattccatgttttctgactgtcaattcagtactcagtcagaggggcagacgggcagacgaggtgcctggggtgcaaaacgtaaagaggtcaggtccttaagagtgaggtggctaggacacaaaatttaaagacacacacaatctcgggtcatgaagtgccacacccgcatccaggccttgctttaattaccactcccattcccctccagcgttgagggcttcactagagaagcctattgctggcattgcaccctggatatctctggcatccatttgcctgttgagcaagcctgtggcttcaccacatccttcctcagaagctgcctggaatctccaactgttcttgtagttaggagaaggggagtgaaggagaatgttgccaccggatatgccgggcaccacaaacaaacaacaaaaaggattcatgtgttcaatggagctgaattttaattgatactttctcaaacagtggttctgaaccaacatcgctcagcccccaaagatgatgaagggggtgcggtttaacgccacaattagcagacaaccccacaacaaatacagtaaacattaatcatattaaatattgaactcagactttggtacgcttgaagagcaatgggtttttaaaattttattttacagaagacaaagcaatgattgtggaggaattattccgatgtcagtgctgaagggaaataatgtaacattctggaatttatataaaaattacagctttgttgtgtttcacactatatatagtaatttaatcatttgcagctgattaatttcagtgaaggaaaatgtagcattatgcatccctaatggagttccaaggtttgaattctaatcgtgagttgggcacagtttaagtctaaattagcaattagcttgggcaagggacatttaggttgaatggaagtcatctgttgacatgtcctgagtcaacaagagagtagcaatgaagatcatcagaaaaatgcctgccacagaacactcttcgctggcttattaattatagtgctgaacattagcagagtgccattccactttagaaaaccttttcgtgtacatttatctcatttgctttggtcttcatctaagtctgtgaagtgggtgtttgtgctccattttatagcaaggaaactgaggcttggagaacttaaggccacacggaggaagagcaccctgtggcaggatttgaacccaagagttcaggcttcaaaatcagtatcctttctacatcaagatattttctggggacaaatttgctccatcttgaggtcctccagaggttaatcctcaaatacatctagaagcaggtacttactgttcatatccctttttacagataaggctcgtgtgggtcaagttgctggtccaagcatgcagctgaaattgaaaacctcgttcttcatcataatacttagtacctctcaaagatggttcttaaacaccaggctgagccttctcgatcttgtagtccacttgggatttggtgtgtttgggtgtgatggcatattttgggccaggaactaaggagaactaaggcacattttggatattctcagatcctgctcccccacttctccaccctgctctgctccaggaaggaggaactgggtggatctgtcaagtctggtcagtgggaacagcagcaggagagaggaggtagagaagccagcagactcagtgtttactcttctggttttctcactgcagggttgccatgagtctgctgtgtcccttacccaaaagtcatggtccctctcactgccccttcagatccagggtgatcatggtgctcactattaccaatcctggggtactacacactcttttcctgcctttttcttacagcctgtcctcccctttgtaactcattcctctatccaggaaccctgcctgattgatggacaaaaatacagtataaaccccacccttcacatcaaaacttgagatttggagtgaaacttactgaatcagctagagtcctggctggaagcagaagttttcagataggttaaaaaagagattttttttaatgaaatgactacttataaaggtgtggacagggttaagtgaacaaagaaatatcaaggcacccaaagactggaagagcaggaagctattactattcctaaggctgaaagggctgaagctggaagtcaggaggggcccctgactactctctcttcttgcccttggaagtcttgcctgtagcaggctctcatgggtgacacccaaccagaaacctgactgcagggcaatgtggatggtgcagggttcaggatcaccctctcagggtacaaaataggacagacaaggtagaaagtggaacactgtagaaaaacagggaatagcctatatgtttatcttgtatctttgcagaggctggaggttaggaaacattaatacttaagagtgtcttagttttacaggagaatttcttaagtatttcatttccaacaaaacaatggattcaagcaaggatcatcaatagatgctaaaatgattgagtaaaaagttggttggataaaggatattaacgtgacctcaaagtatcctcccaaagattactcgttaattacaaacaggtaatgcgatctgtcagatgctggcttaacaaagcaatcaagcttagcgtcttcaataatgggacctactgatgctatgtgccccataatggaatgcagtgggaagcagacaacttcacctttgttggattcttgcgaaaatgcttacgctgaacctaaccaagagaaatatcagacaaatccagattccagagcattctataagacaacttgcctggatgcttcaaaaaagtcagtgccttgaatagcaatagccacaaagacagagctaagcagaaaagagaactgtacaggaaaacttggatgaacctggccaatataatgttgagcaaaagaagccagactctaaaaagagcatgtaaaatgtgatttcatttacatcaagttaaaaaacacacaaaaccaatttagtcattagaagccagactaatggatatccctaggaggtgatgtcagaaagggcacccaagaaggaattccagggttgctaatgatgttctgcttcttgatctgagtgctggttacaagtgcatactcaatttgtgaaacctcattataactaatacacagtgtgtgcgtgtgtgtgtgtgtgtgtggtgtgtctgtgtgttagagaaggagagagagtattagtgtggtaaaagattaacagttgatgaaactagctaggtgttgggtatataagcattcattatcattatattattcttttaactcttctccaggtttgaaattttcaaaaataaaaaatataaaaaatggtttcaatcatttttgtaagtgttgaattaatagaattggccagcacactatgtactagcagtggcctctccagtgattttccctcatttatacacttatttaaatatatgcaaactattcacacttaaccaacataaaacaaacaactcaaaaccattttgcattcatcataatccctaaacacaagccaaatacctcatctggtgcccaaacacaggcatagcaatctgttcccatgttgagagaaaagcatctgtgttagacatactaagctatagcttgggatccacaaagccatatctatgggactttgaattctcaagggttattttaatgttaggcaatttttactatgttcactgtcgttatttatttttgtttaacttgtgttttaagttcaggggtgcacgtgcaagtttgttatgtagataaacttgtgtcacaggggtttgttgtacagattatttcatcacccaggtattcagccaagtatccattagttatattcccaatcctctccctcctcccactctccaccctctgataggccccagtgtgggttgttcccctctgtgtccatgcattctcatcctttagctcccacttataagtgagaacatgcagtaattggttttctgttcctgtgttcgtttgctaagaataatggcctttggccaggcgcggtggtccacgcctgtaatcccagtactttgggaggccaaggtgggcagatcatgaggtcaggagtttaagaccagcctgaacaacatggtgaaactctgtctctactaaaaatacaaaaattagccgggcgtggtggtgagtgcctgtaatcccaggtacttaggagggaggctgaggcaggagaatcgcttgaacccaggaggcaaaggttgcagtgagctgagatcgcaccattgcactccagcctgggcgacagagtaagactccatctcaaaaaaaaaaaaaaaagaaaagaaaagaaaagaaaagaaaagaaagaaagaataatggccttcagttccatccatgtttctgcaaaggacatgatctcattactttttatggcttcagagtattgcatggtatatatgtacattttctttatccagtttattattgatggggatttaggttgattccatatctttgctattgcgaatagtgctgcaatgaacatatgcatgtatgtgtgtttgtaaacagaacaatttatattccttgactgactttagaatccaacctgcttaacctgtgacaccactggcaatgttgaccaatattggaacctcattttgccttcaaatcacacaccctgttggggtagaaggaagaagaaaattcagctccctattctctggtgttttcagttccaggcatggattttacaaatcccaaaagagggtaatgataacaacaaaaacaaacaaacaaaccaggaaagacagagaagctctatttgtttttgtctactcccattccaaaatggcaccctggccaggccagctacagaaaacctgatgtaaacatcagatacaatgagaagcaatagtcttcactctcaaagaccatagctgcaaaattcttatgcttctccccaccctcacccacccctttaactgccaaggattcagggagggcacaagcactgtgacctcttggcatccttggtctgagaaagatgcagattctttccccaactcttcaacttttcactgccaactgaacagacacctttggttcagctcgcctaccaactatctgtgagccactctctagcacggtgctggaacatagtagatgcttgataaatattttttgaacgagtgagctatggagagaagagctgtggaagaagcaaaagtggttttcatggagcattctatgcaacttggagggcttttccccccacctatgctgagaacccagctctggaatcctcaaggggaccatctcgggatcagtacagtccatgcatggcatggccattagtattcttatcttaagtggctttgcagacaattgacttctgcaatgagccagggtaagagaaaaataccatggctgtgtagcaattgcagaggacaggctgatttccaagtttatgtgtgataaccctttgggactccttgacatgactaactcagcatgtgtaaggtgctgagaacctgaggcagcatgagagacagttgatgaaatttctggtattattacaatgagttcaattttgtgcttaaaaatctgtattgagagcaaattttgtgctagatgctatgctaagtaaatacattattttatttaattctcacaacaacccaattagttatctccctttacaaatgaggtgactaagtcctgaagaggtaacttgcctacgtgtgatggttaattttatgtgtcaatttgactgctgtactgggtgccctaatatttggttaaacattattctaggaattttgatgagagggtttccagatgagattaacatttgaaacagtagacaaagtagaggagatggtctttcccagtgtgaatgaacctcatcctatcccttgaaggcctaagcagaacaaaaaggtggagtgagagaaaatttactctctgtgtctttaagctggaatattgattgagcatctccagcctccggactcagactgttactataccatctgctttcctgagtcctcagtttggtgactgcagatctcaggatttctcagcctctataaccttgtgagccaactctttatgaaagatagacagataatagatagatgatagatggtaaatagatagattagataaataacagagagacggatagatggatgaatgggtggatgtatagatgatatatagatagataaatggatggatggatggtggatggatggatagatggatgaatagatggatagatagatggatagagatatatatcctattcgttctgtttctctgagaacctagactaatacactaagctcatgcaattatataatagacactactggctgcttgcctaccaacaattatgagacatcacactccccgctgctggtaggactcatcctccactctgtagatttaaaatgtaaaatacttcccttcccagctttcactgcattcagggcacagatgtgcaccccaaaccttgctgtgtggatttaaggagagtttgctgggggctattgggaaagagtttctttccttaaaaaaaaaaaaaaaaatgctgggcgtggtggctcatgcctgtaatcccagcactttggtaagccaagatgggcagatcacgaggtcaggagatcgagaccctcttggccaacatggtgaaaccctgtctctactaaaatacagaaaattagccaggcctggtggcacgtgcctgtagtgccagctacttgggaggctgaggcaggggaattgcttgaaccaaggaggcggaggttgcagtgagctgagatggtgccgctgcactccagcctggtgacagagcaagactccatctcaaaaacaaaacaaaacaaaagagccacacatgaggaaatccctccctctaactttgtggaatattgtgtctgctttgtgtgggaatcagaaactgcagcaacatcttgcaactaagagggagagattgccttcatgcttcagaaagcagtggcagaaagaaagaaaacatttacattcaaataatattgtagagctgctgaattaaccaattctgaaagcactctgcctccagacttcttacgtgagataacagataaccttattgtttaagttccttctatatagaaatttgttttctgttcccaaaagcatcctaattgttcagttgatttaattttcactgtaagagctcacatcagtggaagtctgtttatctagtcaaaggtatacttattatataagttcacttaatactctttattatttacaaatattcgaatgaaatgctaaatatttctatttacctatgcccatatccattccttcatccttccattcctccatctgtctgtctatctacctatctatcagtgatcgagtgactgattggtcgattgttctgtggtcaaaaaatttcaggaagtggtttcctactaatacataaccccttctggagagcctctgagaagcttctacagtaaaacaaacaaacaaaatccaaaacaaaacatgaaaattgaactcagcattttcctgatattttgtttgtttaatcccttttttgggcacacattttaatggcaacccatttttggaaatgtgcatatgactaggtaactatctcctaagattcccacacacacattttaagagagcaattattccctctgaaggcaacacttgttattctgaagcactgaagcgaagccgccagtacacagaagccacttggatgttgcttagcagatgtttacagatagcttgatgttaatttctacacaaaagatatatttctggccttgccttattgtttatgattcacgactaaattctgggaaccttgagtctggcccatcatcctgcctgagctgaccatatttgacacagacagtttccattcatggtggccacatgccctgtctacaccatccacaccccaagaggtaattcagtgcttgtgttttaacataaacttcaagtcacatgcatactaacactacttcatgagcaagaaattaccacgtctggttcattgacatttacttctgggaaccatttcaatcagattaattcatttatctaaataatcttccactcacttcacaacatcaaaactcaccaatacattttctgttgatgcttccaactttcctttttgtacagtgagaagcaagattaatttttacctggagttcacagactgggcacttattagagtatgagggaatgcaaataataacaacctctatcccaacagaacacaagaaaagggaaaaaagtagggcagatggagatgcaaatgtcaatctactactaatagggctgctgcagaaagttgcttagatgtgcagcagcaactgtaggctttgtgttaggcaggagaggtagcttatgcagcagtaacaaacaacccaagagtcttgttggctaaaaacaaaaatttagttctctatcacattacagatccactgtggcccagctgaggatctgttccatggcaccttaacttggagtcacagcaattggaacagactctaactggaacattttcaattatcatggaggagagggaaacgtaagtatggtgagccccacattgactctcagagcttccacttagaagtgacccatcacttctgctcaactgtcattggccacgtgtaagctctcctaccacagacccccaatattgaaactcaaagctaatcagatgtgttcccctgcaacaggcatcactagaaaagctacaggcttcctcccgagcatgagggcaaaggctttactcccacgtttaccctgtagccaagagcagagccaagcacatgctctctacagacaggcagaccccaaaaggaatggatgaaggaactaaatttccccactcaggtgagagggcagagagtcaccaggcaaaagcagtcaagccacagtaagatttttgcaaaatgggttactccacttattcattgtcttcttttttaaattctccatttcaccatttcactcttggcgtctttattcttcaacaagttctatgccttcatcatttacttctccattatcctagccttcttcattctcctcatccaaaaaacctgaacccaactccactgctggatgcctgaccacgtgcaccagcagtcccatatctgagctccaaacagtaaatctttacatttagaccagtctgagaaggactcttctgtgattgccaccataggcttccaatgggaaacactgaggtcaggggtgaacgaagagaaaatgtgcagcgcccaggatcagcaggtgatggttcaatgggagtttctccccatcagcacttttgctgattctgatcccctctgagggcatgccctttccttttccctttccttatccaaatcccaactattcttcaaatgtcaagctcaggtcccacctcctatggggcacattcacacctctgcagccaacccatagccaaaccctgactacatccctgtgctaacacttggagctcacactgttgtctgacttcatgtgtgatgatttgactctacaagtcaccttggaggatggggacaatgctttatttgctttctgcctccctggcagcacccaggccagcattaggcacagagcagcctcttgactgtttctgatgcataggctgtgcaaggtggttggtgaggtctgctcccgtcacagtgaatggggaagtgactgagaatccgcctctgtcacataaacattcgatggtgctgataactcggcaaactgtttctgtgcaggtcctgtattgtagtactgctgagaccctgagttctagaaaacatgtcacagatgctaagggggtatttctcagctaaaatctgcaagaaagtaaagaaaacacagtttattataattattgtagtattcagttcttccaggcttctgggtttcttgtttatttgtattaactgcatgcctttaaccaaggtaaagagatggatttttgccctgtttattacctagtagttgtactcaattctggcttgacgtcaatgacctttagtgacatcctgatgataaactacctctcttgcctaagttactggatgtgccaatagtaatagtaatagctaaacttgtaatgagccagttactgttccacgcactttgctatgaatctcaatgtcctagagtcacggagaggttgggttacctggcaaagtttacggagcctggaggtgaatcagagtttgaacccctgtactctgcctccagaggccagaccttaaacctctaccagggatgtccaatcttttgacttccctggaccacattggaagaataattgtcttgggccacacataaaatacactaacactagtgatagctgatgagctaaaaaaaaatcacacacacaaaaatctcataatgttttaagaaattttatgaatttgtgttgggcctcattcaaagttgggccacatgttgaacaagctttctccacattaaagagcaggtgaagcaagaatgggagaattcgggtcttctaaaaccaatcacacggggcatgacttttgcagccacacagacctgggttcagattcttgctttactgtcttatttcagacaagtcatttaacctttctatgccttagctctttcatctataaaaggggttaaggaagattaatactatataatgtgtctggcacgtagattcttaataaatgttaagcatggatttgttcacctgttccctggtcttttaaggtcggaatcattagatcattgaaattgcacaccatctgctcactcttttcactcagttccatgactagcaaacacaggacaaagcaggaaaagtgtcagatagaggagagtttttaggctggccaagcagtgaatagacaatcaggcacctctgttcaacctctgcactcatcaaccctcgggttcccctaggagataccagattccactggtttcagcttggaggacaggcttatggctgagaagaaacccagtttcttgggcatttattgttgccccctctttaactgccttccttcccttttcctcctctagcccttaagcagatatttcaaatttattaataggtctcaagtccaatgactgagctacaaacagcagaacaaacctgtgtttcttcacaagcccattaaaaaaacgtgacagagacctggcctagctgcacagaggggtgagctggttaatttagctttcacttccaaaaatattcaaggcaatttaatagcttcatgcaaatagctgtgtctggatgtcaaatcatcccttccttgatatgaatcatggtttattctgttatccctttagcaggacagctgggtggtcaagtgtggactggagggagtctgcctgggtttgaaccccacacttgctgcatgaccttgggcaggtcacttaccctctgtagtaggctaaataatggccaaagataacaggtcctaatacctggaagtggtgaatgttactttacacagttaggtttttgtagacattgttaaattaaggattttagacaaaagggttatcctgacatatctggatgccctgaatgccatcacatgtccctaaaaaaaggagaggcagggtatcgggctcactgcatcagaaggtgcagtgatgacggaagcagagagagatctgaggatgccacactgttagctttggagatggaggaaggggccacaggccaaagaatgtagctccagaagctggaagaagcacagatttccccctaaacactggagggtacagccatgccgacatctcgatttcagtccagtgaagctcatgttggacttctggcctccagaactgtgagagaacaaacttgaatcgttttaagctaccaagtgcatgggaatttgttacggtatccctaagaaactagtacaccctctctgagtcatgctttccatgattccagatcagatgggagcaagaagctgataggggtggccagagagcgaggtggtgaaaagcgagatggggagatactgaccacgaacaccacagctgagcaatttcctagggacacagggcagacgtccacagatgcactccttgactgcaagagcctggggtaacactacacaaatctcagccatatttgtgactttgcagtcaaaatctcactttgccactgggtgacctggagcagattatttaacccttcaaaggatcagttgcctgagctgctaaatgtgttaaataagccatagcaagcacaaggctggtttccttatggtcccctcaaggagcgaagaagcaggaggggcttctcttatcttgctctccactcccttccctttgaacactgatgagataagaaagttacgcaaagttgactcccatagcttcactgcacactaccaccggggcccctaacgtcaacttgcagatcaggatgggtccttgatggagttcctttcggccattcaacatccattaggcacatatttattgagcacctactaagtgccaggcactggtcaaagcacagcccccgtgaaattttttaaagcagaacaatgtagtgcagggccgctgccagctctgaaagcgttttgcagattagagaaggttgcccttgcaaacacagccctgtcggcacacggcttagaaagcagggagaccttttgtgtaatgaaaagcaaacttcttcatctgagtggacacagcccgtgcagggggcatgtcttggcaagcagagtgagaactgcatttgggccctctgtgcccctcatccaggtgtgccagttgtgtgcgagtttccaaacagacagcatccctgaagtcatgcatttttcttaaagataaatgggttctgtttaagggcttctctttaatctgtaatttcagactgtgaaagtgtcttttctttcacaaagtgagggtgagaatagatgggagttgtttgttttctgttttgttaaatgtcctcacttagcaaaataaaaagttgacaactttcttccagttctttattttggacattttactggtccataaaattcaacatttggggaatgaattactgactgatgggaggtgtggcatggtaagaagtcctctgttcaagcgaaggaaaagtcacccaaacaacatagacctgggcaggtaccatcagtgtccctgagctgcagtgttcacatgacgtgatcttgcagaacctgctgggttgctatggttatctcaccatgcctatccattacctttgtgacacatgaggttcataccacatagatattcagaaagatttttttatgtgtctcagaaatgaacacgctagaaataaatatcattgtttgaacgcagctgcatacacacatgaaaatatttatgcacacaggagaatcattacttcttgcatgcattggtgattagatgtacctcatctgaagttcacacagctgtggaatgggcagaccttggctccagagacaaatctagattctctctcttaggcaggatcccgtcagttgacagaaaaagagaactgagaactggtcttggttaaaaaaaaaaaaaagaaaagaaaaataaaaaaaagatggtgatgagatggggaaaatgcattgcctcacataattgagaaatgaggtgtttatttcaggtacagcttgatccaggggttcagggacagacagtatcaggaccggggttcctcccacccccatacactctgccttcccttgtacttactgaccacaggctcttccctggtgagggccccaccatgtgttcagttggctgccaaagttcaaaccttggatggagagatcaaccttcccaacagctcacaaagttctgtgcctgtgtctcattggcccgaattagatcatatactcatcacatgagggggacggttagttctttggaataaagtcatggtgcatggccagggtcaggggatgctgccagtcacactgaatttcacttcaaaaaggagtgggtctaagaaattagtccccaaatagacatctccacgcagctctgcctccttttgcattcaccccacctcctccctgatctgttctccacctgctctgtgctccgagatgctgacctctgaggactgcaagcctcagaggaccaagccccttgctggctggcccctgactgggtcagacaacgggaggcaccagcaggatatctgaaggagggaggaggaagaggttggggtatttcttccatgcatcctctttgccctagtgcctccccagaacccactccctctgggtgctggtcacaccacgtctatcagcctttgagggagtaataggctccttctgcttctagtctctagacatctcagcatcccgtgtttgttcctttgaccctgaccaggtatctgtacgttgtcccttaagtcttttaatttaaatcaggagttagcaaactttagcccacaagccaaataccaccctcccagtctccttttgcaaagaaagttttcctggaacagagccacacacactgtttaggtatgtctaaacatacctgcgactgaaattgtatgtgacctgcaaagccaaaaatatttactatctggccttttatggaaaatatttgccaacccctgggtaaaccacctgatggatttggtttcctgctgggaccctgtctattacatctccttataaaatgtaaggcgagaacacagcttttgctgtaggatttttatgtgaaggttgggacgatactaaaatgatcggcctagctatcctgatggctcaagggaaaaccacacaggggaaagacaagtttttctttttaaaaaatacagtgagcactgctctctcctgtccttggagttaaggggtctcagggcagagaatgcaccccactgctcctgttcctgccccatgcttgtatagacagcacatgtgagtgctccgacttcatcagggcatgccagtgaacaggaaaatcaatatgtaaaaaaaacaaaccaaaatgctggatgaaaaagatgaacattgctaggtttaggaaataaaaatgttctaaacagataaacagtaagcaaagtgctttgatttgtactgttttccagcccataaaaccctaatatccggcgacgtttcattaaaagcttccatgccactcggcatgcctgctgtggcttgaatagatggctgcaaaaatgttatccgagctgcagacccaatcttttgcaatgttttacatgggtgctaaatgggggagaagtctgatcaatcacaaacagaacaccagtttaggggagaagtaaatgttggcgttaaatgaacaatatctatcattctgcaatgtggttcttccagtcaatcaaaaaataaataaataaaaaaggtaggcaaagagcatttattggagtgaagaaaaaaaaagagtaatgaacacatgcaaccagatctttcagctttcagaaacagagagggcttgtgtattgaataatacatagtgaaataaatgttcaaattatgttggaaaacggttcatttggactcctagcccttccaatctctaacccgaataatactccagtttatgaaatcccttcctaatatatcaaaggctcttcacctattgttgcattcattccctcagtggcccctactggaagcttgctgaatgaccagtcagaccggaattcactgtgcaggactcttttctttaatgacctccattcctgtggctgcaaagaggaggaaaaagccctggtcgggaaatcagcaccctgaagtggattctgagctttgaagctgagaggccttgaacaaatgattaaatcactctctgaagctcagtttctttatctgtaaattgggaccaacacctctcgcctgcccccaccccagattctggtaaagtcattcattcacatttgatgaatatttactaagtacattttatgtgtcaggagggtgctgagtgagaaggaagaggcagtccctgccttctggaagctcaaatgtagaggagaatggtcagtgaaaatatgatgtcataagccccaggagagcgtcagagacagttcctgaagacactgggaaggacctgcggaccaggaagaattgtgggaggaaggggtctctaaatggattctgaagaataagtcagtgggtaggagtacaaaggaggatattatcaccacagggaagaggacagagaatgtgacccttcagaggaggtactggaagcatttttgcacggccgagtcacaagattcaaggtagggcgagattcagggcaagagccctgaaaacaaaggagagctaagtacccagatatcaagggcctccaggttctgttaaagagtttggacttctacctgaggacagtggggagcccactgaagggtacctgttgggatgatggcctgcctccatatgttttaggccacccccaccagcccaccccaataacttccaggtggaggagttacagagggcagactggaggcttgggatccagtgaaagatgtcagtggcttgaaggagagaagaggcggaggtaagaggtggcattacaggaggactccatccattgcggagaaaagggagaggaaggcatcaccaaggaaactaggttctggcttagctgaaagggcagatgctgattctattcactgagagggcgcatgcctgaaggtggtgcctggtgcaaggcaaggtacacagtaggtgcttagtaagtgtttgttgactcaaagcagaatctttattctcccagcttcattctcctcctacccctgttaacatcgcaccccccccaaccccgcctcggctccacccccacctcatcctgcacatcactgcctggtaaatcttcttaaaacaccaatttgtctgtcagatttaaatggttcatttaaatggctcaggatttccccagacaccactcaaagcccctctgctcagcaccccccacacccagccagccttgcttctgctctgcttcagtcaggccttcgggacatcggccacgtgacctgctcccctcagggcctctgctggggcagtgcttccctccaggagcaccccccttcctttcattctgccaccgcaaatttgaatcagagaatcacagtggagaccagggaaaaaaagaaaaaaaagtcaattccctctggattcctgttgcttctgctaattcaaggcaggcttaattctttgacatccaggcaactcatcgggtctgtggctgaggaagctgcaagagaggagaaataggaggtaaatttatctagattagagataaattgacaaacgagctatgtcttaatatatccttctagcatatcccagactcttggagtccttttgattttgaaacatgtttttaaagcatgagtggattatgattgtcagaaaaaaagcagtttcttccaggccttaagctataaaaactgctattcctgttctctctgcaaatgagcccactttagtatgccctgctgggaaatgaaggcaattgctttattcctgggaattaccaaagatttacttgaaagtgctacctcacacgcagtgggtaataagtctaaatgaaaaggaaaacaattagcccaaatatgccaacctcaacagtgttggttggttggttgattttgaaagctcaattttatttctagaatcaaaaattgcaaaaacaaacaacaaactacaaaacccccagtggttaaagtccttgaatgagaagtccctaggaagaacacagatggggttcctttcagggccacctacctttgtgcttgagcccacccaggaccctgggaaaggtgcccatttggacaaattgggcccccaaattgcaatccatcaggccaagaaagctacagagccaccaaaaataacaaatagatccatgttctcttgtctgtcctgcatacttcccattgcaaatgacaggcctccagcctcaagccggcttcaccgtccatccaaccaccagggcagtgtttctcaaggtatgatctaagaaccacgtgcacctgcattagtatcaactgaactccttattaaacacacagatgcatgacacccattccacactttccaagtccaaatctctggaggtagttcttctttttttttttttttttgagatggagttttgctcttgttgcccaggctggagtgcaatggtgcgatctcggctcaccgcaacctctgcctccgggtttaagcaattctcctgcctcagcctcccaagtagctgggattacaggcatgtgccaccacacccagctaattttgtatttttagtagagacggggtttctccatgttggtcaggctggtctcgagctcccgacctcaggttatccgcccacctctgccccccaaagtgctgggattacaggcgtgagccaacatgccccacccagctggaggtagttctattcttcaacatcatcagggtagccacactaacaacacctctttttcctcttagtccatgggcattttccttcaattgttctcaacatatccagcttaaggtccgtggtccattgtttcaataacaaatcttgctaatattgtaaacttccttgcaattctactgtgttcctccagtaaacacactccccatccccctcaataactttgtcaaatctcttcaaactccaattttctaattgccgatcccccacccttcttgcatttgacctcacttctaattatcggagatttagagatgtctctaagatgtctctcctctttcagacaccaacacatgtacccctgtctccatgggccccttccttcaccttgactcaggatcccaccccaactccttctcggaaccttacactatcaacatgcctcctgcttttcgggtgttcatccacctcctttcaatcaatccttccccttggctctttttggcttcgtagagtatcattagtgacaattagtgtgagtattctctccaatatcccaggaggagaatcattacatcaatgaacacatactatatacctggctaccacaagtgaatgttaacctgattgttacctttaaatccttttttaataataatgataataataataataataataataataataataataatgtgtttcaatatagttttaaaaacttataaaaaattttaaactttttcttataaattataaaaattttcaaatacattcaaaaacagagaaactagtataatgaactcctacttacccatcagcaagcctcaacaattgtcaccattttatcaatgtatatattttatttattttattttattctggagacagagtttttgctgtgttgcacaggcgggagtgcagtggcacaatcttggctcactgcaaactctgtctcccaggctctaagattctcctgcctcagcctcccaagaagctgggattacaggcatgcaccaccatacccagctaatttttgtatttttagtagagatgggatttcccacattggccaggctggtcttgaactcctgacctcaggtgatgcacctgcctccacctcccaaagtgctgggattacaggcttaagccactgcacctggccatattttaaagaaaattccgtgtattgggccatcacattatgcgtctctaattgataagggccaattttataaaacataacctccaggccgttatcacagctaaataactgtgattccttaatatcacctaattctcagtccatattttattttcccaattgtctccaggatgtctttttatagttgggttgttcaaatcaagatccagacaaggttctcatactgtatctcattgttttgtctcttaagttgtttttgtcctctaatagtctccctgcctttatattttttaaatgccattgatttcttgggccatttgttacatagagtgtcccacactcttgacttagctgatcacattgttaaagtgctgataacttgtgtctctatctcccatattcccccatatttgtctttttttttttttttaaatcaagagtacttcataggcagtacttttaaacatacttacatgatggagaccactttcagaaaatctgtccctcatcctcacatcctcttccagctaccaactttcctcctccccatccatagctgaaggagtctccagaaagccaccacgtttgctttcttaatttcttcagctttcaccctctcttcaacccagtcagatctggcttctgctcctgtcacacccagaaacagtaatgacctccattctttcaaatcaaacagatatttatttgatcaattcccatcttattccagttatagaattcaatagcttaaggcgggaatttatctgtatctctcatagttccatggattgactggaatcagctgagcagttctcacttggggcctcttaaggagctggcgtcatctgaaggcttcacatcctagatggcttctttcttcacatggctgctatccaggttggatctcaggaacaactggggactgggatctctccctctctctccttccccttccatagagtaccttcacgtggtagtttgggcttcctcacagcatgggggtttatgggtaaagagacctcttacatgggggctggcgtctcactgagaaagtatttcaagagaccaagatggatgttgcaaggatttctgtgaccttgatagtcgcgtagcatcccctctgcttcagtctagtgattgaacgggccccacccccattcattcagtgttgggggcactacacgaagatatgaatttcaggaagcatacttccctggggccatctttggagactatcacacttctcctttgactcttcaacaattatcagcacctcagtaaattttctgatttttgaaatactctgaccgcttgctcccataacaagccacttttctgttccctttctacctctctgacaaaaacctctcagtggtctttgcaggccccatctacctctgcccagtcctccaggcctggtcctaggtttcttctcttccaagcctcttctctcccaagcctcttctctcccaaagccctttcacatggaggtccatgatttcaattaattcctaaaatgggcatgactaaagtattattcactccaacccaaatctgtcctctgagtatcatatcccaccttctagaaactgagtatcatatcccaccttctagaaacctcttcttgaatattacaaaggtatattaacatgttcaactaaactcagaatcaacccctgccccaaaataagccccttccacatttcttcatttcacctaatggcaccttcactgcctccagttacacagaaacttgagggtcatctctctctctctctctctctctgattgaatctattcattctatcaccaaaatattacttctaaaatgtttctgccactcttccccacctccactgccatcaccctctatccaggccaccctctggggctatccctagaagaaaatgggacccatagcaactcaagtcagtgcagagtttatccaaagtactgacccttaaaagggagccactctgtactggcactggcatcttttattggctccagaagatactgttaaaaactgacactcaaaattgaattttaatgatggttcattaaaaagatattcattttgcagcctctcacctcaagtgtggggcccaaggcagatactccatattctcttcctgaaggaaaggtctgctaacaggtctcccttcatccactcttgccccctagaacctgctctccacacagcggcatgagtgcaaatgtgaattatgtcctctgtttaaaactctctcatgacttttcattggttttggggtaaaagcaaaacaacaacaacaacaacaacaacaacaaaaaaaaaaaaaaaaaaaaaacccttagcatagcttacaatatacataggaaactgtattagtccgttttcatactgctgataaagacatacccaagactgggtaacttataaggaaaaagaggtttaatgggcttacagttccacatggctggggaggcctcacaatcatggtggaaggcgaaaggcacatctcacatggcagcaggcaagagagagaatgagagccaagcaaaaggggtttccccttataaaactatcagatctcgtgagactcactcactaccacaagaacagtatgggagaaacggttcccgtgattcaattatctcccacccggtccctcccacaacatgtgggaattatgggagctacaattcaagatgagatttgggtgaggacacagccaaaccatatcaggaacacagtctatcctcttacagcattttgacgcaagtaacaggaactcaaactcaatcttgcttgaacaataaggaattctaatatctcatagaacagaagtcctgaggtagggtggcctttagggcagattgattcagcaacccaacctttatcagggagaaagattctttccacatcgctattctgccatcctcagtgctggcttcttcctgagaggggaagatagctgcagcaggcccaggcttcacatccagatttcacaacactcaggggaacacatggggccatcttttcttgtggcttgttcttgagagtgaggaagctgtttttggaagtcccctgtgaaactttccttaattgctcttttgccagaattggggcccacccttataactaaaccaattactgcgtgatatggtttggctgtgtccccacccaaatcttatcttgaattatagctctcacaattcccacacgtcgtggcaaggacctggtgtgaggtaattgaatcatgagggtgggtctttcccatgctgttctcatgatagtgaataaatctcatgagatccgatggttttataaaagtgagttcccctgcacaagctcttctcttgcctgccaccatgtaagatgtcccttcctcttccaccatgattgtgaggcctcctcagccacgtgaaactgtgagtccattaaacctctttttctttataaattacccagacccaggtatgtctttatcagcaggtgaaaatggactaataaactgggagagggattactacctggaactgagagtgaagttagcatcccctgatgcagaaagctgtgttagtggatgtatggattcctgaacaaaagagggattctgttggaaggaagaagggtgtaggcactgctagggaggcatgtctagtgacccccaccttatacctctccaggtgatctcactcctgcttctctggactctctccactgcagctgcagcagtcttcacatccttgtctgcacctgctttcttctatcacagtccttgcacacactcgccctgcccgaggaatgctttctcctagggaaatccaattcatccatctgtctgggaggaaatttaatctctctttaaccctcataaattcgtacttgggacagactcctgttagcaacagattaacaagggaaaaacaagcaagtttattaacatgtgcagtgcacatcacatgggagaaacttcaataaaaggtgtcaacctaacgtaaccacaaggctcaggatccagttcaaatgaattgatttaagtaaaaagtgtgagggtggccatcccaggacacatggacagcaaagaatagtgactgctgttctcggtgtagggaaaagtgaagatcatttataccgacaaaactggaggcgctgaacagaattacaacattttccatccaaaggctaacacagagatataagattgactggctactcttaattacattttaaggagtttgcttaatattctgttgagaagaggtaacagtcacaagggtctctgtcatttagtctaggtttgaatgaagaacagaaaacctagtaaaatataactctcaacacaaaagtcaggaagaaacagccatgcatcagagaagaaaaacaagcatgttatatgactccgttttcaaggcttaacttttccctttggcataatcaattttgaaggtcctgaaattttctgttcgcaaaggtaactccaagcagtggcttcgaactctggcttatatggtatcttcaacaaagaacaataaattttagagaagtgacaagacaaaggaaagcagttgtaggtttccagaggtgggaaactgtgggaaggcaaatatatgggagtaaagtcattgagtaaggtttgtttgcagattactcctgtgccatatctgagtgaacaacagctgttcccagtaaagaagaatttatatcctgtctttggaagaaaaagcaggggaggatagaaagagctttccctctgtttgctgcttcttaattgccttttgctcaaaaatatttatgtcaaagaagcatcttttgggatgacatattctactttctttcacttccaatctcagctaaatgccttcccctggggaaatccaactcatccttttgtctgggaggaaaagctgctggaataaaagcaggcagaagaacatggaaggactagacttgctgagtctcctggccttcatctttttcctgtgctggatgctttctgcccttgaacaccaaactccaagttctgtagcatttggactcttggacctacaccagtggtttgccaggggctctcaggccttcagtcactgactgaaggctacactgtaggcttccctacttttgaggtttggggactcagactggcttccttgctcctcagcttgaagatggcctattgtgggacttcaccttgtgatcgtgtgagtcaatactccttaataaactccctttcatgtatacatctatcttattagttctgtccctccagagaaccgtgactaatacatcattctccacccctccctgtgttcacattgtttgccccataagtccactctgtcactggcacatggcttgctttggccaacaggatgtgagcagatgtgacacagcagatctttacaaaagcacttgcacttttctgcttaggccttgctggctgagtggccataagcacatgcctgggctagcctcctggagtataactcccctgggacagccaaattgtcctagttatcccagctgtggccatcctagcaaagccaatagccaaccagtcccaagcttgtaagtgagcacagtcaaaacaaggaagactgcccagccaacagcagctgactgcagaggcatgagcgagcccagcccagcagagataagctaagctgagcccaggtcagctaagaccctgcacacttgtaaacaacacagtttattcttgcacgccaatgaaattattgaggttgctcattacaaaggattagtatgtcaatggatatctggtaataaatgcggtttaaacatccagcaattgaggaatgctgcaataccttgcagcaattaagaaagctggtataaagactatactttcagggatcatttctatagttcattactaaagaagtctatctgaacatgtagaacacatgacaccataaggaggaggcacaacattctccctagagcctgaagctggctcttggtgtttcatgactacagcagccatttgccactgatgactgttctcttccaggagaataagaaggagaagatgcagtttgggttgtttaaaaaaaagaattctgatgcagatgtatattgacttgaaatgttcacaacagactgataaattgtaggcggaatgggaatgggaagcaggttgcaaaacaatgtatgtaatatgataccattttcataaaacatatatttacacatttgcatatgaatgagtcaggtctgatacacaagatgctgaaagtggttatttccaaatggtaggatttggggtgattttcatttgttgtttatctgtgttttagagttattctataggaacatgtgtcatttgtacaattttcaaaggggagaaaaaaatcttttccatagagtacagcattaaaaaattttgaaatcctttagcttatccataacaaccctgagtgtgtttcaagtactttttgtggaaaaagtcattgtccgctcttgcagcatcctgtccaggagacttggtaacactggcttgtccaggattcactaagggattgcaggtagcagaacctgcctgtctgatcccactggtaaccctgagctctgtggttggcagtggcttcatctttccagcccacacagagacagcgaagcctaaaagctcctctaccttggaggaggcaagggttggggtcactgcggttccctactatcctaacagcagagtagagccttcccagtaacttcttgcccacagaggttagttatgacctttaggaaaacaaaagagaccttttaaaatttcctactaacaggaagccaaatttcatacattcagagtaagaaattcaatgccccaaggcaggacaaggatagctaccaccttaatccttctaaaggataaaaggacttcctgccggcctgcctgcctgcatttcctccttccttgctctatttttctctttctttttctctctctctcattcttcctcttttcttcctttcttatcccatttgcagttaggcttttacctaaaacaaatcctagtttaaagcaagtagatccgtccctttactgtccttaccagttctcaatttgcaataaatcccaaatactttttttttttttctgccattactggtgctgttgctaaaaccctcctcagagagctggtgaaaattacccatcaggctgatggggtctcatggaatcatataatccgatcccagcttgtccctaaaacactcacttctttccatcattcctacttccttatccttttgccgaattcgaatagatcttaatcttttcagcacttttatgccccagcactcctgtcctaccgtcctcacattctgtggagacattgactcagaacatgcccaactgcccttgcatctccctctaaatggctccctgctgtttgtttccagtgtatcaccctcctcacctcccatctcccgccaagctctcgaccccaacacaactggttttccctaggacagtgattattttggttcagatccagaggatcatgaggagtccatgaggccctgaaggtgatccacaaatcttcagaaagcaaagcagaatctttatgtcaatttttaggtgtgagtccctagctttcttttaatttccaaagggctgtatagatctagacagtgctttatcagttaccctctctttcttgaatttttaggctccctccctttcaactggtatccccttctccatctacacataacctgggtgtaccagggccatggacaactacgaaatataattaccaggtgtattggtctgctctgtttggcataacaaaatatcataggcagggtagcttaaacaacagaaacgtattttctcacagttctggaggctggaagtttgagattaaggtgccagcatggttggcttttggtgagggttctcttcctggtttgcagatagccattttctcacattttcctcacatgctctcatgacctttccttggtgcgtgcattcaaggggcctctctcttcctcttctaaggacactagtcctattagactacagccccatctgtatcccttatgacttcaattaacttttttgttttttgtttttttgagacagggtcttgctctgtcactcaggctgcggtgcagtggcatgctcatggctcactgcagcctcaacctcccaggctcaagcaatcctcccacctcagccctgtgattagctgggaccacaggtgtgtatcaccatgcctggctaattttttgtatttttttttgtggaaacagggtttctccatgttgcccaggctggtctccaactcctgggctcaagtgattctcccgcctcagcctcccaaagtgctgggattacagacatgagctgtcgcgcctgcccatttaaccttaattacttcctaaagattctgtccccaaatacactcacatagggcagagaaaagggagtgttaccacttcaacatatgaaacttggggcgacacaattcagtcaatagcaccagaaataaaaataacttgctttaagatatcaaagttgctatctttgttacactgacaatagattcctaacttatcttttttctctggctgcttttaagatcttctctttatcactggttttaagcaatttgattatgagatgtcttagtggagtattcttcatgtttcttgaacttggagtttattgagcttcttggatctgcagattataattttcataaagtttggagattttttcacatcattttttcaaatatgtatattttttgcttcccattcacagacttgaattatatatataattccaagtggcacatcccacttcctgggttcagtgggatagtcctacctccctggagaccctaccaaccaacacatcttcagcccctccctcctgaagtggccacagcagctcaaggaagacagaaatttaagtttgtcccagagataactaatgctctttaatttttaaaattcgttcttgtctgagtcttttacttaggccagtttctattgctatgcctccaagttcattaatattttcttctcattgtaaagactgggggacctctttcttaagtgatctttgtcttaagatttggtgcaatatatcagtagacctaacagaatgaatatctaacaaaagaaagttgaaaactaaatgactgttacctttctctttgaaatactgtaggaatgaaagttagatatactttgtgacttccacgagacactgaccatcacacaggctgtgatttttatcagtgcaagacgcaaggtgagcaggctcactgagaaaacgcacaccagggacttcacagttcctgctctgcatgatgatatggactagaaggaaaaagatgttagcatgagggatttctgatcagggtcaagctgtgttctgatcactaatgacttgtcggcttgtgggatggaggagcaatgagtgtctttggttacaaactgtgatctacctaccaattgtgaaaactatattcacaggagtcgacagcagcagttgatggcaagatggtactcagaaatggcattgatgtaatttaggacgtggaatcataagtgagacagcacacaattagaacaaagaattggcagagggggtcgacttgggaagaaaggtgtggatataaactgttactgaagaagacaaatagattgttcatgacactgagactttctacgataccatagcggaagagatgcccatgcatgtggctgaccttatttcattccgaagtgagatagttttggatgcagtgctcgttgttgctgaataagtgaccacaatgtgcattgtgcttctttctttggaaatatttgaatcttgtctcaatgcttaaaatcgatcagagatacagattttgatagcaaagtgacattagtcatgagcccttgtgaagatagtcattatttttttatcttctttagagttagactgagggggtgggtataaaagatggggtctataacatctttctttcttagaaatgtatttcctagtcccatggaaatggttgcattagatgttctctatcatttaataatatacttgtggactaaaagataaaagtgctgtatgaaataagccaattatgttaaactagcacatctgcctttactgcgtttatcattagtctgaatagaaagacctttaaaattaattttttagaaagcatttgaatgcattctttgctattgtatttattcaataaagtatttaattagtaaaaagatattgtcttctgcaatatctaaccttctgttaatcttatatggtgtatttttcatcccagatttcaaagttttgctatctaggctttcaatttgtgtcttttttgtattttctctggctcttctgaacttttaaaacatttaacacaattacaataattgttttaatgttcctctctgttaagtctaatatctgtgtcagttctgggtcagtttttacagaccgattattctcctcgctgtgttttcctgccttgctgtgtctttgattggataatgcaaattgtgaatttcaccttgttgggtgccaaattttttttttttttaattcttgtatgttttcttgagcttttcaggtcttgcctttgtgctttgagaggcactttctggagcagtgctcagtctagggttaattattccccaccactgaggcaagaccttactaagtacccagtgccccatgaatgatgagtttttccagtctgactgatgggaacaggtaccatgcctggcacccactgttccttctaatcctttcagatggctcagtcctcagcctacacgcatgcactgttcaccactttgctgaatggccaaggggatcctctgtggagctttgggattctctctctgtgcagccatcttctctccagtactctctctttagaaccacggctgacttggtctctctggacactcacttctgtcttttcaacttcaggagtctgccaggatccatcttagttctccctctctgcacagtgacctggcaactctgccaaggtaattctggggtaatcctgggactcacctagtttgtttccaatgttgttcattgcctggtgtccagtgtcttgaaaactgttgcttcatatattttgtttgtttgtttcaaatgggaggataaatccagtccctccttcactccatcttgaccagaagcagaagttggtagctattgttattttatcattcattcaagatattttaggggcacctactatgagccaggcactatactaggttgagtatacagtggtgagccaaaagaatatggtcctggtctcacagcaaatctgtcttatggcgatcaacttctgccagaaggcagtaaatatggtaggccctggatttacgaacatggacatgaatcggctgtgatcatttctctcaaggaattcagaattagaagggaagaaaaattaatacaaagctgactgtgagaagtatgtgagatacaaaggctctgggcatattgatgaagaaataattaattctgatttaaggtataagggaaaacttcatggagaaggtgacatttgagttgggacctgaaaagttcatgtaattttgaatggtggagaagcaggagggaggtagagatgctgaaagtgcttttaaacatgtggcagacacagctatttggcttgttcttcctcgcccacagaaccctaatcatgtgcttcagaggatgctacatacagtactttccagctcctaccagtgagtcttgattggttgaaatcaatcatggaatttctattccccatgcctgtcactggatccagcataggcacatgacacaattctggccaatgagatatgagggacagtctgctgggaaagtttatttttcaaagaaagggagagaacattcctttcccctactgtttctgagggagaaacaaaaacaaaaacaaaaaaacctgattccttgatgatgtcctgaaaccactgaaattaaccaatctgaaaccaatataactcatgacttcttgttgcatgagatggtaaagttttcttcttgtttcagtaacttctggttggatttttgttgtagttgatggtgttacttttggccagatgcgggagaccagcataccctaagctgatcagtttacccatttgaaactcgcttttccttttcactgaatcaaccctctgctaaatgttacttatcttgttcttgttcctctgcttcatcaagaatggaggttaacctaagacctaaggcatgacaatgcacttagtcactcttcccaaacatgcacatgggggggagatgcaaaacagctttgaaaatgaaagaaagcaattacacagtgcaataccttgactattctgtcccatcatccttcctgaacctttgattgggaggacttgaactcttatggtagggtggagggatgaaaataaatataaaggaaaagagtgtaggcaagcccaggggaaattatgtaaattcttccggattcacagcagtgctagaattctctggtaattcccacaggagccaagactacctctgaaacaatctaactgttggaaaccaccagtgtctggcaggaagccaactataacaagggcaaaagatatgcctttttggagagtctggaccaatcccagggacccaggccagcctgtggccaaagttgtgaatatgcaaaaactgtcaccagtctccactcgctttcccgttcccttcctagtccccttctttttctagccccaatctttttctccctgttcctcctcccactcctccttctcctccctcactcactcaacaattcatatcctgcttgcctgatgagcacagaaggtactaaaccgcctaccttaggacacttgcatttcagcagggagctcttacacccccaaggtaatgctcctctattgctagaaattcagatctctaggctggctgggggaagcatgtctggtctcaggcacagtacttcttgtgccatgcaaagtcagctggtgggaagggggggatccaaggaaaagaaggggactaggaagagaagcggggatccaaggactggcttcccagctctcactgccagccagtggggtcacaaagacattgcctcaaatgtggagctgtcctctgctagctcgtacaggatcttatccttctctcacataactacatccttccatctagcttatcttactcaccttcagtctcaatttaaatgtgtcttcctctgggaggccttccctgattgattcccatgtctggatcggttcagtacccccagaccactacatgcctttctctgtgagcacttgtcatgctgacttgtgatccatggatctcagttagccagaatccagcacagcctgacacttagcaggtgctcagtttatggaacgaacgaacgaatgaacatctgttcatatacactatagctctgcagacaccatgattatcttgttctccattgtaccctcagcacccagtccagtgcttaggctgtagtagtaagacagtaatgatttattaattgattgaaagagggcgtcccaagaaagggacttgcgtctatgttgcgacgacatctttattgcaagggcaagaagcacatcccagacctttttgaaaacatcagggatggaggtgggaggcaaggcaagatggaggaaatttctaggagtacagatatttagctgtcatggtgggtttccctcttcaactatcgtttcagttttctagggtttttttttttttttatggagtttctctcgtttcccaggttgaagtgcaatggcatgatctcggctcactgcaaccttcgcctcccaggttcaagcgattctcctaccccagcctccgactagctgagattacaggcgcccgccacctcgcccagctaatttttgtatttttagtagagacggtgtttcaccatgttggccaagctggtctcgaactcctgacctcaagtgatctacctggctccgcctcccaaagtgccgggattacaggcatgagccaccgtgcccggccttctagggattcttaacctggggctcataggtggggcttcaaaagatccatgaatcctccgactctttaatcaagcacccgtgtcagtagctgtatgtgcatttttctggaagaggatcatggctttcaatgagtgtcaaaaggctgagactgctcgagacctcaccgtccaatacggtagccattagtcccgtgtggctctttaagtttagatttaaattaaaatttcagtgcctcacttacactaagctacacatcaagtgctcaacagccactacctacaggccagaccagatagagggcatttccatcattgcagaaagtttgatgggacagatatctgtattggtagcattaccaactgaatacaggtaagattggatccaactagtgcttttgtaaaatgagttaccaacatttagaaataaaacataaaaatctaaaatcctgattgatttcatttgggaaacaggactatctatcagcgtggggcctgcgttcccctggcagctggaacgcacagtaccgctccctttagagggactcttggtcatatagaagttccccgcttgaccctccttgacgactgacagtacgaccctcgtttctaggggacttcgcccgtcttggtctccttccaggctcgcgtttgtaaccagactccaaattttactaaatggggttgaattgggtttgagagcacatcttagagcagggtctagggctgagattcggggtctcagttggaagttgaggaagggcaacgtctccttccttacagttttcccggaactgtaggaagtcagagggaattttatcctgcacatctgttgcttgacaaagaacttcccaatcctcctccgagccctccagtccctagcccagttcgcccgggcccgcccctagcaacaagatcgcggggaggggccgaggcgaaacacgagccccgcgcccaccaccccagctggcgacgtggctccgcggccccggcttcccccggcagctcagcgaccaatgggcgcgcgagcggggccgcccgcagcttcccagcccgaggcccaggcgcgcccctctgctccggctcggggcgggcactggcggagggactggccagtcccctcctccgcgccggccccaaccctgtcgctgccgccgcgctccgagtccccattcccgagctgccgctgttgtcgctcgctcagcgtctccctctcggccgccctctcctcgggacgatggcgcgcggtggccgcggccgccgcctggggttagccctggggctgctgctggcgctggtgctggcgccgcgggttctgcgggccaagcccacggtgcgcaaagagcgcgtggtgcggcccgactcggagctgggcgagcggccccctgaggacaaccagagcttccagtacgaccacgaggccttcctgggcaaggaggactccaagaccttcgaccagctcaccccggacgagagcaaggagaggctagggtgaggccgcggccagggccccgtggggggcggcgcaggtgtccgagggccgcctgggcgagagccacgcgggataccaccgccaaagcgaaagcgaaatcgcgcgcgcggcctcgaggatggggccctgcccaactcggcgctggggctcaggctaacttgctggagggccccgggaccccagcttggagatcgccgccgccgcgccccggccggggtggtttctcgcggggaggcgagaacgtggcagcggccgcgggagccaggacggcgagggcccgccccctcccccaggttgcatcagaagggaggggagagtgcacaaaagaagagtttgtccacagtggcctgttagtgccatgagttcctccccactctctcgcagtttctctctgatcccccactcccggggagaagggcttgagacactcgctaagaaaatctcagggatgaacataaatggataaaagatgaaggggcaggcgagcgacaggcttgcttcctggtctcggccgcagtggtcttgccttttgcctaatcgccctgtaaatctatcgtaaggagtctgggcgcggtgactcacgcctgtaatcccagcactttgggaggccgaggcggggggaggggtggggagatcacctgaggtcaggagttcgagaccagcctgaccaaacggcgaaatcccgtctctactaaaaatacaaaaattagccgggcgtcgtggcacacgcctgtaatcccagctacttgggaggctgaggcaggggaatcgcttgaacccgggaggcggaggtagcagtgggccgagattgcgccactgcactccagccggggctagagtgagactccatctcaaaaataataaaaataaaaataaaataaaatctagtgtagggatacaaaaatccggttgaaaagggacacgcagtttccgattggaaacacgagggagcaggaatggaaacggttcgcctgaaacgtttctgttggcagcagatgtctgcagaagcactcagttctttggcaactgatttgtttggggggcaaaaagctggagggttctcttggtggtggaggattttgacttgggctgttaaaggcagttgagtcaggaaccaaacccgggaaacaaaacttcggcgcattttagtacaccctccccgggtcccctgaggaaacacttgggcactgtgcggaggtatctggtggtccttgcacagaggacccagcaggcagcctggtcccagatggaggcagggctggggaagaaaccagcagtcctgcctattgggcaccaggtctcagatctccctgaacctgattcctgggggtggaggatcttcatgttctgccacatgaaagagaacacagccatccctgtgctcctgggggcctccaaaggccaaagtgtttcattggaatatgaggataaattatacctattgtgtaggtgcaccatttgcctgctctgataaaaagacctttgaacttcaaagtcacctccaaacaattaccttttatcttgcagagtactttctcttctcagttaggacttaacaataggggccattgatgagttcagtctattgtattgctttgaggcacttggagactgatttatcctggagccctgagtggcagccacattgtcactggagaggaggcagggagaggttttgggatttggaaaactttataaggtgtggtcatgcagcttccagttaatgccttcattgtgacagttcagcctagtagtgagaaaaagtgacggtgaagttggtctggatttgatccttgtatcaacaccttgacttcattcatttattcatgcaacaaacatttgaatggctactgtgtaccaggccccagtttagataactggcaggtacaaagatgaaaccttatgctctgggcgtcgaagtgcttgtaagcaaatgtggaggagagaagcacagacaaactagccattatgcacaattgctgcaatgatggcctataaaacctactgtgagcacattcaggagaaggagccgccaaggctgcaggttagagagaggggattggggctgtcacctgatcagagtttgtaggatgacttggaggttgccaggtgtacagcaggggaaggccttcctgaagagaaaacagcccatttctaaagggtttgaaaagcgttctggggcatgaggggtggtgagtctgcaaaggggcagggaagggaagtgagaggtgagaatggaggggaaaccaagggcagagcaggaaggaccttggtgagatggacatgagatgttatcctgtacattgtcaaaatgtcataatccccaaaactcattgggaaagtcaggctggcaggagggcagtacacagagaacataatcaaggcacagactagaccagtggcagggagaggaggtgaatgccaaaggggcttggtctctccggattccaggaggggatgaatctagacaccagtgggaggcagaactggcagctcttgctcttgactcaatgagggggagaagagagaggtaggaatcaaggggacatccgggtctctggccttagccaccagatgggtgatggatgcaccattcacttgtaggttaaatgtggggtagaggcggggtaggaggtgctggaaattatgggtcctgtttgggatggggctgagtgtgagaagctgcccctctgtccaaagcttctgtttcagtggtcccctccaagattgggctgaggaggaatgagtgtggctggatctaggcaactttgtcaccatcacctgtcagtcctgaaaatgtgacagctctaaggcccctaaagacacctggaccagaggttgcaaagtgggaacccgtaggctgcatgcattcataaatatgcgacacagtgtaaattacttgcccacgtttaaagtttgaatggtttcacatacagacccccatatctggcttctcttgacacctttattcccatgtgtcagtcatcgtctgcagcagagtcggccagccctatttggcggctagcagggtacctccaagtggccataggtcccatcaaaaggttttgctcattctgttacctgttggtgttgagaacaaatgatgatggagttggtctgggtttgctccttgcatcaacaccttaacttcattcatttattcatgcaacaaacacccgaatggctactgtgtagcagctaccatcagccactgatctagattattgtctttagtgaggaaaagcatgcattctctcctttattcctcacaacattccttgtgaagtaggtgttcagtttacagatggggaaactcagagagtcaagacacttgcccaagatcacgcagataatggggaccagaggcaggacggggatccaggtgttctgatgaaagtgctaggcttcatctccatcctagctgcctttcccaggatctcccttgacattgttaaagagaaggttaagatcttatttattcttacaacaaatatttattgagtccctaatatttgtcaggctgagctatgtcctagatgtttatttggcatagattagatgctgtcctttccacaaaagaggattgtagagtctgatgtcattaccctgagattatgtttcccagttggcgttgggtaacccactggcatgtctccactgtgtccccaggatcagagcagtgcttggcacataactgggctcaacactgcacaatgttaaaagaattctgctgtgtctggctatgatttcctgggggaagaagcctgaagacacttgaagtttcatgttttagtctttttttttttttttaaagacagggtcttgatttgttgcccaggcttgtttacagtggtacagtcatagctcacactgcagcctcgacctcctgggctcaggcaatcctcccacctcagcctcctgagtagctggagctacaggcatgcatcaccattcctggctaatttttttattttgagacggagtcttgccctgtcgcccaggctggagtgcagtggcgtgatctcggctcactgcaagctcagcttcccaggttcacgccattctcctgcttcagcctcccgagtagctgggactacaggcacccgccaccacacctggctaatttttttgtatttttagtagagacggggtttcaccgtgttagccaggatggtctggatctcctgacctcatgatccacctgcctcggcctcccaaagttctgggaccacaggcgtgagccaccatgcccggccattcctggctaatttttaaattttttgtagagtcaggatctcactatgttgcccaggctactctcaaactcttggcctcctacctcagtcctcccacctcagcctcctgaagcactgggatcacagatccagcctatcttttaggattgagacctgttaaacttgcaaatgaaggggtactttcaagctgttggtgatgtttacaccttcctgagaaagaggagcttgggttcttgggttcaggtaggaggtggagacattgattattcactcctccccttctcgtgtacaccctcccccacctaaaaaaaagttataggagattttctctgtcaaactatcaaactgatgaatttgtttcccattttttattaattaaagattaattgccactcagaatgtctgttgacaagaaagttttaccactgaagctgttagaattccagcccaaaacaaagaaagaaatctagagttagcctgtatgacctcctcccagataaatggactacaagggtgaaacttttttaaacactggggatagcttggaggtgtttttgaagttccccactgggatgctgtcctggtttgggaccatctggtctagagatgacaaaagtgggttcccagcctgaagtttgctctgggctagcatttagggtacctcagtggagttcagtgggaaatttgtgaaacctaggccagctgtggagctggtataggagtctttaccctaagagcagagggtttaaggttcctagagcggatcagctggtcaagttttgtgaatagattctatgatgtcaaggctccttcagccctgacatttgtgctgtgtccaccatctggtgtcttcttgctttacgtttcaagtctttgtatccatggtggtgggatttaaaaaaaaaaatcacttatcttttgatttacatacagtttccactttttgccttggacctaagccagaagacatgagttctcaccccagttttaccaaatactggctgtgtaatcttagaagttattccatttctctgggcctcagtttccgttactccaaaatgagggtgctggactacagcagggaagattaataggtttcatcttacagatcagctctgatccgttgataatggccatcaccagagcacagtgctgagaattctgagagcacctctaggtttatcaggacagaggggcacgatccattagcagtgtctgccatcagcactggttgggggaaagcacatcaaccttggaaggataaacttgaagattccttccagcctccttggatcattgattctgttgtagttgtatgtgcattttggattgtgcaggtgtttgatcttttgctggaccagcatcacacaagccttgataatataacagccttgtgcctgtgtgtgggtttctttttttttttttttgtactgcaggaagattgttgatcgaatcgacaatgatggggatggctttgtcactactgaggagctgaaaacctggatcaaacgggtgcagaaaagatacatctttgataatgtcgccaaagtctggaaggattatgatagggacaaggatgataaaatttcctgggaagaatacaaacaagccacctatggttactacctaggtaagaggtgctgcaggagcgatgacacagtgggggcccagatcacaagctttttgtagactctctcttctcttatcatatccactcccttcagggagatgtcacagcctcctaagtagaacctgcttgtataacaccctcctctgtaaactcagaatgtactgagttgcttacactgaatgaagttacaggtgggagggaagggctgtgagggctaataaaaaaaatcccttagattgagaccccatctcaacttcgtctcagatgcacacacggagaagaaagcagaaaggaagtgtgtctgtggtatattttcaaaatgctgcctaattctggatagcaaggattgagtgggccggagcagtcagggaaggcttcctggtgtgggtggtttggaaactggagccttggagaatggatttatatttggagaaggtgggtcaactggaggggcaaagatgcagcaatgcatgcagtaatgggaagggtttagatccaagacaaacaagatcgggagaaggaaggagaaatgagattacagaggcacggggtgcagacctgctgggtgcatggtgaggttggcaaagaaacaggcccaaggagaaccaaagatgcactcacgcggccagaatcggggagatcttgaaagccaggcacggcgttgagacaagatgttttgggtaccaaagagcctctgtatgttccagatctaagaatgagatgatgaaagtagagttctgcaaagagaagtatggcagtaatatagtctaaagcctgcgctcttaaccacttgcagtaattcccctaatatgccatgaggcctagattatggggtggcttgaagggactgatattagaggcattctgacatagaatgttttaaagaactcagtaggtcgggaccttttttccctatatgtaccatttgagcatgcaggatgagtgatctggcaggaaacgcctttcttgaccgcacggtttaaaaacatttctgcatacatacatcctgcaggaaaccccgcagagtttcatgattcttcagatcatcacacctttaaaaagatgctgccacgtgatgagagaagattcaaagctgcagacctcaatggtgacctgacagctactcgggaggagttcactgcctttctgcatcctgaagagtttgaacatatgaaggaaattgtggttttggtaagataagtgaagagtctgggctgggaagagaccagggagaaaactgcctccaaatcttgtctcttccaaagagagaagatttttcagcctgaagggaattggagaaggactctgaagtagagtttgttggaatccccgtctacccagaaaattagtcaggtcaggctggctgctgtaacagatagcccccagttgtagccatttaacactagcaaagcttgttccagccagatggacctcctgggctgttctctgagcacagttgggtacccagttctcctctaagcactcctgcttgtgctctgccatcttgtagcttcaaagtcatcctggcaacacccagctggctgacaaaggaaaagagagggaatgagaagatacagtctttgtttactcttccggccagggaatgacacatccccttcacgtatgttccactggtccctcctagatatgaagaggctgggaaatacagtttagatacgtgcctagaaagagtaaatggggcccaggcacagtggctcacgcctgtaatcccagcactttgggaggccgaggcaggcggatcatgaggtcaggagtttgaaaccagcctggccaatatgttgaaatgctgtctctactaaagatacaaaaaaaattagccaggcatggtggcatgtgcctgtaatcccagctacttgggaggctgaggcaggagaatcgcttaaacccaggaggcggaggttgcagtgagccgagatcgtgccattgcactccagcctgggcgacagggtgagactccttctcaaaaaaaaaaaaaagaaagagcaaatggcttaagtgagcaactagctagtctctgccccatttttcaattttaagggacttggaaaaagactcagaaatggaatgaattggattgttaaaactgtatggaaatgtaaagtaaaaattatggctggaagagatgctacccttagcgggtgggtctttggagggtgggtggatcaggccctaggctttgaggaatgactatgcttgtaaggcctcagaatgtagttgctttccgtagtgtcttgttgggtcccaaatgtcttcattttccatgacaattaaataaatgccatcacctgttttcctgggcagatgcaccaacccagttccaactgtttcaatcctgggaaacagatggctagagcttttgtttacacgagctgtggatggttttagttatccaggtggtggaagggtccactcatgcttcatcctcctgactgccatgactgtaaggactgggcagtggctccaagaatcatttctctttaccactcaacattcatgtagtgttagctaatgtggcagaggacagtgcaggtggtgaatgatcccgagtagactacgagcctttgggagtggctctctgctctcaggttggctctttggtttgacccaggatgcctctgagttgctgtgccaatgaacagtaaactcatttaattattgacccaatcaaaaaatactgaataagaggtcaagtatactaaatacagagcacaatacatcaaaaagtcagatatacttttattttttagttgcccactgtttcacatttctcttgacaccaactcagtattcatagtcctgttagcactagagtctattcttgtggtcatctaatccagtggttctcacactgggtttctcgcatgttccccagtgggtgttttggctggatggtggagttagttggcctggcagggcctcctgatatcgtcagagcacctctggggttacaggtacatcttgcttgctttgaagaaagcattctgctctggaaactggggtgggggattaggaacagaaactattgcctgttttttacagataaaaaactagttcccagggaagtaaggcgatgagccagaagtcaccaagcattcagccgtaaaagctggacaaatgaggacaatagaattctcagacttcttagagcacatggccatcttgcattctgttttaccttttgcttcctaggaaaccctggaggacatcgacaagaacggggatgggtttgtggatcaggatgagtatattggtgagtactgacctagagtcttgctcagctgtcctgactgggccacatgaccccacccacacgtctggctactttccccagacgtctcttttagcaacagctgcaagtctatacgtcactcctgggagcttccagcctgcttgtcccatcagccctagtgatgtagtatcagggaagtattattaggcctcattcagtggagaagagatgaaaaggctggccctacacaaggctggccaacagttggccccatgactctgagaggtgcccttcatcacactgcctagttttacctttgcaaaaggacattggagatcccatagatttacagtgaagatagaggagacagtgtcagggcaaagcctctaaaactggactgggtcaatggagcctagaaactctgagtagatgcagctgtgattaacagaactgtttatgtgtctgagcactttgcagaaaggcattcttcttagaaagataaatgctttacagagtgcacaattgcccaataatatgctcattttgtgcccctcgtttcccatcctttggatgggagtcctatagtgtcaaattaatgtatttgggtctgaacccaccattgctggttagagcccttcctggtagccccaaatcccccccagcccaaccccccgctagaaaggactagagcaggcaacaaggacaattccatttgatcctcaccacctgctatggcacatggctccagctgcaggctcccttctcatggcagctcttttcccaagtctcaataaagtaaaagctggaaaatcatttggtttaggtgttgacctatgaaaagagaaatgaaatatgtataatttttgtacagatttttaatcaaagccattaattacctttaaatgtaaaactcagagcctgagttgctgtctctggttttgtggttgtattactttgccatcccagacacgagaacaagtgccttcagcaatgaagagcagactttcctctaatcattagaaattatgtttgatcatgagccaaacactgttccttgtgtgtcattggtaacagacaaggtagctctcgccacagtaattaaagtgatcttggtggcactaccctgatagaataacatatgctgacagctccctcatcagagcaagcagttgagccttcctcttgctgggtccacgtgcgagggtcacgttcggaggcgcagacctcttactgtggcactggggatgaaatgagactgacagcaaagactgcatgatcaaaacaaacaatgtagtgcttttgattgaaagtgtgcgctctgcccagccctccggaactgtgcattgaaatggtgcaaagtcagaggcagaactcttcgagtggctttgcctaaaagaagcatcccattctttacagtgaatagggagagggaggtggaggcgttgcgcttgaaaatcgaatacctagtgactcacaggcagaggaaacccaatgtattgactcgtcatttcacttctcggggaggcttctcttcaagcggcaccaagtggaaagtgtgtggtggggggtggtagtaggaagagcactggaattaggaaccctaccttcaccaattagctgtgtgaccctggggtaatcatgtaatggcttcaaacctcagcttcctcatctgtaaaatgggggaaaaaaagtgagcccatttttacaggattcgatgaagctcgaattagctaatacatattacaactctttctcaaaaacaatgtagacatgtcagttaggggtctaccttgtagtcaagggtcttgtctttttttttccttcacttactacctgcttcattcaccacctgacatttccaagctctgcttccgtgacagagaaactgcctgcagggtatctctcttttccaagagctactgacacacacacaatgcaaaaacgtttcctttttcttttccttgccattttgtacaatggggataatgacccatcttgtagaattgttataaggatgaaatataatgacaagtgaaagccctttggaaatgatataaacaatagtactaaacacagtggctaagactctgggttgaaagcagagtgaccatgttcctgtgcagcctccagctcatatgagctgtgggtcattgggtaagactttacctcattgttttcatctgtaaaatgggaattataacagcactcactttgtaaggctgttatgtgaaaatcaaatgaaaactgtgtgtagaacactttatacagtatctggaccatagtgttcaatgttagtcattattattagttttcgcttatgtagtgccagtttgggttgtagagggcttttacatcaaaatggcacatttgatcataatagccccatgatttataaattatcatctccattttacagacaaggaaacttcaggctcagtcactgaactaagtcaaaagccgggatttatcttttggcttctaaactcagttctttctactccaccacatggccttcatcatgaataaattactgcatcattatccccaagaagctgcctaccagctgtttgagttaggtctctggattggttgtcgcctttcctaaagctcaggaggtcaagtttgttttatgggggtgggggaggtttaccttcccactttcctttgtaaccaacaataaccttcccttctagcggatatgttttcccatgaggagaatggccctgagccagactgggttttatcagaacgggagcagtttaacgaattccgggatctgaacaaggacgggaagttagacaaagatgagattcgccactggatcctccctcaagattatgatcatgcacaggctgaggccaggcatctggtatatgaatcagacaaaaacaaggtatttcccattcttctggaatcactgattgaagggagacagtttacataagatcggttttgtttgctttttcggcgatagcattgacccatgtggccatgtctttattgacttttccttcttgtcctacagtggagacctgtaaacttgagctaataccgtgataacccacagtaaaattattaggccccaactttcctggaaagtcagctgtgagccacagacttacattaagtcacatttcctaagattgcagaactttgtgggcaggacacgatttaagaagtataccccgtgttgccctaggatcagcttatttatccattcattgtcaccaaatacttatcaaacatctgtgaggtgtcaggaacaaggaagcccatcccattaaagcccagacatcctcaggcaagctcaggtttctggctttaatgcctagtacttcggtatctattgataaacatccaaataaacaaatcaatacatttagaaaaatgtcctgcctattccccactttgctgattgcccccaaattctcaggttatgccaacagtcagtttaggcagcgaggctgtaagaggaaagtggcattcttgagggcctattttgggaagaccaacactgcttgtgggcacaaatggattctagcttctgaattactcggggacttccctgacacgttagcacggtttttatagcaagaggctgttccgatttggagttttgcaatgcagtcatggtagatgaaggaggtgcccagtagcttctggattactaaatatagtattttaaatgttgtacatcagtgaaatgacatgaacatcatacagaactagtacagttaccagagcttccatgacagtgctctttgatctcttctataggatgagaagctaactaaagaggaaatattggagaactggaacatgtttgtcggaagccaagctaccaattacggggaagatctcacaaaaaatcatgatgagctttgatagacactcaccagaatatggcagactgtcataggcattctgttattgtcttggattgttgctacaattgtctaatttacagcagttgtgatcccacaaaaagcaagtttatacctcagattggggtataaaaattgtttttcgctcagtatttactggaaaatggacatcactagtctttcagtaagatttctctcaaaacacgtgaaaaccttggtaaattgcaattctttctggggatatattggtacaacatgacttaaaacttttttttttctattaaaacttaaaggggaacaaaacttgaaaaagccctgttcttcagaaggtgagtgggttgagggaggcagtaatatgaagtgactgctgtgtattttaactaccagattttttatatttgccactgttaaatagttggaaaggggaaattctgattaagcgaaagtggtatcatcctaggtaagcttatttcagaacaagtctaatatttcagattctttcttttcgactttatactctgagttattacttactgtaagtggtgtatatgaaacctccatgcattttccagtatggatctgctaatatgcacagtaaatccatgtctttgtttgtttttctattaaaaagcaatcaagaaagataatgtgaaaaagaaaggaatttagaggtagggaaaagatgaatgtcagacatttgaagaactatagtaaaatgataaacactaaatatacttgagaaaactttcttaatatgccaatgaggtaggcctgatctttgaaatagtgaataggaatacaatgcatttcctcagtgatcactgattagaatgagttggtgggatccttgggaagccaaacggagcggagttctggatcatgtcccatccagtccagtgaatccacgacccgcagacctgtccccccgcaacagcttataccatggaatgaggacaaggtgatactctgagctgtggactgaactggcagacacaacctgtacagattgaaatttcaccttgtaaggaggaagtgaatgaaataaaggatccccctaaggattttctactgtgtcctgtggtgtttgacttcacagatgctatttgtgacattattcatatagcataaaacagtggggttggatcccatgaataacattataaaggttctggggttttttttcatccaattactagaatgttcagaatagactcatatttactaatttaataaatgtatgtacttaatgcctttacttttctaggtcattttaactataaaatcttcctgaaaaaggttgcacctggaaaatctggacttcttccctgggcctatgaggcgctgtaggaggaggcctatgggatctggcccctaccagcagtagcatcatctccttaccactgtccctttcataccgcctatagtctggccccagagactttctagtcctcagacacaccaaggtcattcccaggttgggccctttgcacttgctgccccctcacattcagaatacccatctctcacgccctcgggtaacacatggtacttcctcaggggggctttccagaccccactatttaaagtaatcccaactcgaatctcggtttcacatccccattttattttcttcttggcatgcattactatttgtattcatttccatgccttctgtccaaattgccacaaagtgggggatttacagtgacagaaacttacacggttctggaggccagggtctgaagtcaaggtgtcagcagggctgctctgcctctgaaggcactagggaaaatgcctccttgcttcttccagcttctggtgactccttggagttccttagcttgtggctacatcactccactgcgtcatctctgcctctgtcttcacaaggccttcctctcctttctctgtgtctccccttggtgtgtcttttataagcacacttgtcatttgatttagagcccacttggattatctaagatggtctcatcttgaggtgcataattacatcatccctttttccaagtaagatcacattcacaggttctgggggttagcaggtggatatatcttttggtggggggccttcattcaagctaacctactacaccacttgacattatattgtttggacattgcttgtctctcccaagctagaatataaaccatgagaccagcagtctcgttttctgatttactgctgtttcccgggactgcgaacagtagagtctattagcaataaatgctcaggaattatttgctgaatgaatgagaggctgatggctttaatcaaagggaatatctctcagggaaaaaaattctgtaaaaaatattaaaatagctaacaattgctaaatgggaactttgagcgatttgcccaagattccacaatgattaaatggcaaggcaagacatcaactccaggtgttcctggctccaaagttctcttccatttagctttaagttttgctgctccaaatctcaaaatttcatatgttttctctttatttctttgctcatccacagcatatgattatgtggtaaggaaatgagaataactccgctttactagaaataagcatatggctttttttttaaagcaatgagaagctgttttttaaaaaatgagaaaataatattgtgtaacctaattataagcataacaatttaaaaggtgatgacattatttttcacctccaaaaaggaatatagttgatttattattgtatgtagtaagacattaaatatatttgga

SEQ ID NO: 509 - DNA, 468235 bp, Homo sapiens
  source 1..468235: mol_type = genomic DNA
tgtgctgaggccctgggacttacaccatgccctgcaaagtgccatcttcctagcccacctgcagtggaaccagcggggctgctgagccaccatgctcaagctgaggatgcgtttccaggaacaaaggggcagagggcacgtgggacgtcgttggggcagcaagaggcgagggcctggctttggggtgctgctggaggacagcaccatttccctccgccccgtccacccagcagatgtctggttagcattcccggccctcttcctcacatgggtgcgtggcagagtggtgacaatggccacagctgttcatgcctgagaagctgcccagctctgatgaggccttgttgtagcatgaacctactatctcctcaagacgcttggatccaaccatttaaccacactgaaatctacacttcacagacctgtacctgttaaaccctgcagcttcctaaggggcacagtcccggagacccaccaagacagcgcctggattccagcctctcccagccaccccagtgccatcctctcacccaagacctggactgagagccacctggggctcctgtggccagcctgcgggcccatccctgtgccctggtcagccacgctgctgagcaggacccctgctgttcgcctcaagggccgtcatcgtgtgcgccactcgggtctttgcatggcgaagctttctcaggtcctgagcgaggcagtgcctggtgcctgctgctccccaagtctttaccacgtggcggaccctgcctggtttgaggacagtttaccaacagtcagctttctgggctgctcttgccccatgtctgcaaacacctagaaactgatggccctatcccagatgacaaagggtggacacacatttccggggacaatcctgaggctccaggaaaatgccctcaacaggttctgaagccacagcgcaattccaacgcctgcccccctgtggccatgtccacaccctgcaggctgcctgcagcccctttggagggttagagccccttaggcctgggatgcatcctccacctggagtgcagctctagagctgggtggctgggggtggggtgtgggggcactggtaggccacggggaggcagatgggggccaggcaggaggccgctaggatggggtggttccgatgtgtctcctgagcaggcagggtgccacatgcccatacatgctggtaacgcccacggattagaggtgtggggtgaatggcaaggggtgggggaagatgctcttagtcccaatgccagtgcctgcttagggcccatcccgctgcttggggagcctccaaagaaagacagcaccctcaccagggaaagcctcttcccagacagaggatgtttctggaagccactctgggatgcaaacagggtcccgagcagcagggaacagccgactctccctctgtcccttccccacctggggtaacagccaggatccccgcccactctccaggaatgagacagtgcacgggagacacccaagggttgtagtgtagcttggttttatttatgtccacaaatatttcaaaaaaattacaaaatactcaaatggagagaacacagaagtcacgatttctgggtgtctactgtttacactgtgttatctcatggcaaactactcatatatacatttagcttcaagatatatagaaacgtagcaaatccgagtgtgcacgctgcctctgccgcagtggagtgaagctcaacctcgaggacaccgaacaagatacggacacacacagaggagccaaaccaaaccccgaacaaagggaggaaaatccgaaggaaaccgagtggttgggcttcaaagacaccatgaaggtcagggcctcctaaacaaactgtagtttatctggtgagggtttcgggtcgagggttttttagatggaagaatctcagcgcttcgccttgggatatggggagaaaagcaaagctaacaagaatgccttcggacggctttcaagcacagacctcagaggactcgactcttctttggaaaaatggatgccaaaggaggagataaagaaggtttaactgaatggtagatgttgtgttctaccaaaaagaaagaaaaaccagaagccgagaaggtgggggcctggatgcaggagtctgggagcccagcaggaagaggcctcgctcagagccacgggaacaagcctgccatgagggcctgtccccaccccagaaggaaacgaatgccttcaagccaatgtggcctgaagtcccacgacaaaaggttcatgtcagctttgcctccctgtgaacaaactaaagttaaggcagaaatggaatgagagaaaaatgaaagaaaaaaaactagaaacattttcaacagacaaaacaagcctatcccaactgaaaccaaacacggtttttaagagaaactggaaatgtcgctatttgacgccagaacctgaatttgagccagtagctgctggtttctagatcaaactatcagcatctcttcctgctccctctgcggcctgggtcctggatggactttgtgtccgccgacccagtgtggtctctgtcctacaattcttgggatgggaccagcacaatggcagaagagacctccagtgtctgagagaaaaggatcggaagaggccacgtcctggcaggaagcagggccgacagagggcagacaccccagaacacccgccctcagcctgggagaaagtgcgttacggctgcagcctggaaacgagggcaggctctctccaggacggttccgctcagaagggcctggcctcctgagaagcagcccccacacagcatgctttctgaatgcactgtgggtgggactccagttcccacttccaggatgaagagtgggactcaaatggtttaccagtgcaatgtggggtcaccatgcagacctgcccctagggtaaaatacaggctgcccccaacacctgtcttaactccaggatctcccttgctcaaaagtggcctcaatctgtggcaagaaagatggggccgtcctcaccacaagatccaagtgacaatgcgcatgagaaggcagccttctaacacatccctttggcaggcatatgtcctgggtcacttgtgtgctgagttatttgtatggaatcattttcttagatgatgaaattttcggagtattaaaaaagacattcatccagaacaatcaagtgtgtgtacacagaaatctagaaggaaatctacaatggacacaggcccatgcgctttccatcccgtggaaacagaacagtgacactggagaacagaaagtgaacattcacctcctgcactccctgtgcaaaatggaagaggtctgatggagcagatgtctgtgctgctggcagagcacaggctaggagcagacacaagtgaaacgccaggcagaaaacagagtctgtaacatcgtccctgcaaaccctggatgctcgctgctgtgaccaggcctcggtccaagcctctgtccatgtggaacgcccctttgctccctttaattaaagggataattatatataactttttattaaaaaatcaactctgtattctgtcaatagttggtaggaattcacaattagtgacatggctggaaaaaatagatcacaatagtagtttatggaagaaaaaaaggctgttctaaaattatttatttacagacgtaaaaagccatgctgcagaactttctccaattatgaagatttcctacaatgtattaaaataaaagatttttttttttaaaaattatagctcttggattccaaattcctatgcccccgatctgcaagcctcgtgggctctggagcactcgtggcggagtgtgtcagtgtgtctgcacgcacagtgaagggtgtgaactggattctagcacctactgagaaatcaaggaaaagaaaactaaagccaaaccccaagattgcagggaagctttctggatgttcagtccagtccaggactcactaagtttctgggggactgtcatgcagggagatccaaaccagtctcaggaaatcctctcgacaaacgaacactactatgtggatacatttttagttgtgggtttttaaatatataaagaaatctttagaagatattctttttgcttttgcagctcctattttatgtaaaaagtcctgtttctccccccaagaactggggtttccacagccagcgttaacaaataaataacttataactgcttgtcaccttctttcttcagtcgactggaaagacaaaacaggaaagcgtatttagtctcaggcctaggcaggcagtcacgcaggctggaggcaaccccaaagacaacagccaggcaatccaaccccaagcccgcagcctcctgtgtagctgacctaccctcccaacacctcccttcctctgtttctcccatcaccatggttccacaatgtcccctccagggcccagcaggcagagggggaggagcctggccctgggcacacggggaggttgggagcctgggctcagataacccctccactccctcccagcaccccacctcacctgtaataatcttcctgacttggtaggtggccaccatgcatgtgggggtgtccatgcagccactgctgctccatggccagtctctgcagctcggccgactgggcatgcatggcctgcagctggtgggctgctgacatggggggtgggatggccccaggcaggtcacgggggtagggggtgcctgccgaacacaaaacaacctgcgctacagaaatagccagaggactggccaagaccagggcggcacaggcacagcaaacggcaaagagcacaggagaggtgccagttcggacacaggagccagcccctcccagactctgcagacagccagagggcagagcctctggggaggcaggaggtgcccttgggtgcctctgcctggacctgcctggcccctcctccaaggcctcagcccaagtgcttctccttcagagacctgccgtgagtcccctctgctactttcaccggctcttagcaaggctgatgcatttatgacccctaccccagacagcccccagagggcaggaggcttgttcccccacggaccccctgcatgcagggggagcgaacccacctgctcaatgcatgaatgaatgaatgagtaatgaatgaagacagcagaccagaccccaacccaaccctcacacggcctccccgcccctcctggaggggaagtcttaccgaaaactgggtggcgaagcatctcgtgctcgtgtgggggctgtccaagcagagggttggggagagtgccaggcgggtaggggaagcgagccaggtggggaccggcagtcagggggtcgaccagcgggtgaacggggcctgctgaacctaaggaaaggacaaaacgccagatggaggcggtgtgcagctcttcaatgtttgtcccccttggctggaatgaccgatgacttcctcctcacccaggatggctcctggtcaccagggctggatgcaccacctggctacaggtggccctgccccaaagtggctgcctccaccttcagcaagagctccagaggccgagagaagtgacgagcccaccgctgatgcaggcactccctcgtccgcttgtggagtgcccctaacaggcaatcccaggccagttttgtcgaggacccgggatcagcagggtccctctcgccggccacctgggcctgccctctgcctgtcaggtcacaggaacacacagccttgcgccagtgggtgttgggctggcaccccctgcccagggctgtctccctgctcttcactcgcagaacctaaaggaggccagcagagtgggtggcgcagaatggggacctggcacagcactgccctctcctctctgctggcacaaatcttgcgtctctcccttcagaacgttgccttgatctgacctcactgcaccacctcctgccctcacctcctatctcccagctccagccaacacaggcgctggcagggatttcagggttgccacctccagccatgctgccctggggtccctggaagattgggagcccccgctctgcctctgtggctgctcttgccccgatttcccacagcttgccctttcatctcctccatgtttctgctacctcctcagcggacctctcctgacggccttctcgaaaccgccatactgcccctgcgcccagctctcctgatcccctcttctggatttatttttttccagaacatatactttctgcctctcacaacgtggcacacgtctttcaactatctccccaaactggaaggtaaatgtggacaggggttctgccagcacctacaactgtgcctggcacattccaggggttcagtaaacacttgctgaatgaatgatgcatgaatgaacaaatgactacctgtcctcaacactgctcatactgaggcttgtaaggtctacaccaggtgccaacagagcttcagatatgaggacggcaatggtgagtgctctcccatgtcaggactgggtacaggggcaggggaggcgcctggtgcctccaagcaaggtggctccccgccctccctctgggccctgctctatcagtcatcctgccccacactggagggtggccagtgaggaagccctgcacgtaggctgtcccacaggacctgtactccaagtcccatggagcaggtgaacctgcctcctcgtaagcacagtagccaccccctgcgccatctcaccaggctgcagagggagtgaggatgccagctgggcctgcctctgcctcagagcagcctctccacagctggtcaatgagtggccttaaggagctcctacttccagggtggacaggactgagcagccctggccaggtgggtcagctcggaaaactcagccaaagccagcaggaggcctgcccagcctcgctcctcaagggaagaggactgtgcttttcattctccctcagccacccttgagtagcccagtgccttatctgtacgttccttggctccaaaggccacatgacactgctctgctgcccttaccctgccctgtgggcctaggccacttccctccatcccaggcacagggccaagaacccaggcttcacccgtgtgctgcagctgtctgaggccttgcagttctggagagctgcggggccgaggagagactgcgatacagcaaaaccatgacggtagtggatgctgagctcttctaagatctgccagggatgagggatctgttcagaaaagaacagtttccgctcctggatggtgactgtcactcatcaggctctgcacccctccccgtgcctctgtcccacctgccacgctggggcacgcaccttggtggagggggtcctgctggtggaggtggaggtgggagtgaatgtgagagtgctggtgatggtgcggagtcacgttgaacatctgcagtcgggccaggggatcgctggtcagcgatgccatgcgctctgcgtggatacgctcggctgccagtctgtcagggtagctcatctcgggccgcagctgggggcccgccagggccagtctctccctctccaaggggttcaggcccgggtggaaagaagcaaaagggtggggcccggcggtcggggggatggtgagggcgctgtgccgggcaaagtgctccatggggttggcggctgggtgcagggggtccagctctgggggcttcacctcgaagcccggcttcatcctctcccgcagctcccgctctcggatctcccgctctcggatctcccgctcccggagctcccgctcgcggatggtggggtcgacgttgtagaggccaggcatgtggtaggccagcagggggtccgtggggttaaggggcatgtagaaggggtggttgcggttggtgggcgacatgacgtggggccgggcgtactcgctcagagtccgaagggcaggtgtgtcgggcccgatgtaggggggcacagcagcaatggtggttggtggtggctcgaaggatggccgcatgtggccaggaccactgagctgtgggtcactgaggcgaccttcatgcgctgagctggacgccttctgcagaaggaaaagaaagcgtgaggggtcccccgagcgcctggggtctccgcttggtccacactgcggaggtgggcctggtcctgctcctggcctgctctgacaggccaacctggtccctccacggagacccggccctgccttggcctgacaccaggatgcagtccaggccccacagggtcgggctcacctgtgcccgcagctcccctcaggcccagatgggaatgtgtccctgtgagactaagctcatgcatgggttgtctacgtgtgagggttgtgtctgggagtgacagctggggggcatgggtgagtgagcccagcaggccaggaacctcactggcagtccctcatgccacttcctgggttggctgccctttcctccccgcgacagcagagagctggccaccaccacagcacccagcccacgagggggccacaaaggcagggcagctggagaggcccctcgcagcctgcttatcgcctgagtgctcaggtcttctctcaaggcgcccccttgtgcttctccccgactccttcaaattacttagaagttatgaacccaaaggctgcaggagaaggacaggccctttcctcgaaggccctccggtaggaggacgcacagtcactgctgggagtcagcctagacctgccatgcgcagttaccccggcagcttcggatgtgcagcacccgtcagaggtgtggagacagggtgtaaatagcacccaaccctctagctgccaggaggccgagtcaggcagccaagggcagagctcggtggcccagcgtggctcccaggcgcaggatggaccagcgccccccgtcacacctcgccaaccctggactcacagccgcccgctctgcctcgcgctcccgctctcgctcccgctcccgctccttctccttctccttctcccgctctcgctcctctcgggctttctgctcagcctcgcgcttggccttctcaatggcctcctccctcttcttggccagcttggacccggccagaggcatgaagtacaggtctgtccgggcacacgagttgtagccccggtccaggtgtttgtagaacctgagaaaagccacagatcttgctgggagctcctgccgagacccaccccggccctccctcccaccagaacttgcccccaccagcccacctgtgcctgacccgtcctggagccctaggaagcgtacctagctgactggctggcgtgactgggggtgtccaccacagtgggctccggggacgggctccttggtgggggaggggggctctcaggctcctcagcgtcgtccagagcctcctccttgatctggacggtggggagtgggcaggacgacccccccgctatgctgcctcctgaagccgccgcaccagagcagggtggctgggccgaggtgccaggtcccgccggtggggtagaggtggaggggcaggtcggaggggtgatgggaggagggcctccagggacaaaggggtgctgagcaaacgggggttggggggccacctggtggaggcctgtaggggggtgggaggcagggggcgggggcaggttctggctctgggtcagcccggggggctgggcgggcgaggagggcaatggctggctctgaggcatgagttgcaggggtggggggtgagccgacggggggtgatgtgtggacagggagctcaggggcttcagggctggagggggaggcaggttggcattcatggagaagggtgagggccccgagaggtggggagggtgcttgtgggcctgtggcgccggcagctgggggatgggagtggtaggcgggggcttgatgtggggcatggccaagggcgctggtggcaggggctgctcccgtggaggctgttgggactgcagcgctgactgagaggctggcagctgcagggaggtgtgagggtacgctgctgctggggaggtccccagaggggcctggccttgggaggcctggggagggaggccaaagggctgtggggggcctgggtgctgcagcaggggcccagcctgcaggctgtgagggccgggtgggccctgaccgtgcagtgggggctgggcatgagagggtgcagaaggctggcccgccgacccagtcagaggctgcagcgggggatgtggcgagggatgcggcgggggatgcggtgagggcggccgctgggggtgcaaggccggtgcctgttggatgtgggtgtggggaacaggcgctgtgggagcctgtggctggttaggggcctgggaggccgtgggggagccctgtgggggaactgcagtggcagagggcgtgggccctggcgtgggcagctgaggggtccctggaggagctgaggagggagctggggtgaccccagtgggagcctgcaaggctgggggctgggcctgcagcatctgctgctgggctgacgagtccgagtcactctcattgtcctgggggctggggatgctcggggacgtgctgcgattgtcctggtcgatgtctttggggtcactgctaccctcatcgttgacgctgcgactgtctgaactctctccctcaccttcagatggcgagttgggcctgctgatctcctggagtcagagaagggaaggatggaagtcccaggagggcagagccctgtctgctctgcaccaccagtgccggacacacagtaatgtttgtgcagatgaagcagcaagcttggctccgggaccacaggtcgtgccctgacccagccagtgtcaaaggccactccagccccaccctaggagacagggcacggccaccaactagggagaaccccggctgggggcttctgaagaagcattagctttactcagcaaggctcagcagcaaacctcacctgcgtttttgtcttcttggagctggtcctgtcagcctcctccgtatcagaggccaccttctcccgctggcgtttgttactcttaagaggggaagaggcttcctccttcaccttctgcaggggaaaagcccacaaggagcaatcaggccaagggagaccatcccatcagcctcagcaaggaaatgacggtttgcagacactttgctccctcattctgagttccatctccaggagcaaaaagctctagaagggtcaactggggccaagaaggaacacgtatctgggggtgggaatgagagccagccctctgcacctgtgggtttgcatcctcagattcaagcaaccatggactgaaaatgtaggcaggactgtgatggttacatctatactgaacgtgcacacaatgttttcttgtcattatctcctgaactagacagtggaaccactgtttaaactgcatttacattgcactgggcagtagaagtaacctagggatgatttagagtctacaggaggatgtgactggtcacatgcaaaccatgtgtcgatgtatatgagatttgagcacctgtggattttggtatcctgggcggtggaggctctggagccaatctctaatggataccaagggaggactgtacttggctctggagggagccgttctaaccactccccacactttctgagaacttgggaagcttgaggcagaggtggcccccaagagttggtgctcgagcccccttctctaggcccccagccttcggtctgcagcccctaggccaggacaatgctggtgtccagacaggctccatgaatgagctgcatcctcgtgtctgagggagctgatcacgaataccagcaaaccagttttaatgtgagggagggacagagtaggccctactatccccccagcacctgaccttggccgacttcttcactgtctctgctttactgtcattgctggaggtactggcagcgctgggggagttccggccgctggagcggatgtcttcattgatgggtgaggtgcgaccatcagggctggctggctgcttcttccgaccactgcgtagtgtcgacatctgcccacccaaaccgaagactggtgacaccagattcccagtccccatgtggacccacctgagcccaacccacaggcagaagcctgaaggcacaccctatcagcctctcagcaaatcccagaccttggcaaacaacaggccgccctgcctgtccctggctgcatgaaggtcggtgtggagctcagggaagaggtggggaaatcagtgggctcacgccagagggcggttctcaaacctaaagcactcatcccaagggactgtcctgaacaacgtgtgctggaaatgaaccacactttctgagcggcagaaagtcgcctggggccatctttaaagcaccctacaccctttctgtttattcctcataaccgtccattctcccaaccaaaccaaatgaaatcaaacacttgtggatttaatctgacaggacaggaagtgacccaaagagatgaagctgtcaagtaaagcagctcagctccccaagccgccaagcgcttcagcatgtttctgcaaagccatgagggctcagaagagatcaggagacaatggttctggctggttgacctgctcccttctgagtgagcgggggccgggctgccagcagcctcaacggcatacaaggggcagaggaaagtggatggtcccacccacctgccagaaggggccataagggaggctgaagggaaagaccctgtcagtaccctcagccccaaacctggaaaaagcctctcccaaagtccctggcacatttccaacctaggaaacaaagtctctttatgggaggagctatgcagtgagcagaaaaatgtatcggaagtttccaaaacgggatcaaacatttaaaaaaaatcacaaacacactaacacaaaagagcctgcaagtttaaaatagcagagatttgatacaatggaagtgacaccacaagcagcagccttggagagcaagaggggccttggagagcctgcactgagccagaagctaagagcttgctacaaaacccagagcaggatgccaccctggggcccctcgaaggagagaacagagaactcttcccagcccacaggcaagctaccgcctcgggcaaagcagctcccctccaggactttgtctggtaaacaagactttcgcttcctccccctgggaggctcaagcccccacacatcccaggaaactgaagaagttgccaggagccccatggccccaggggactcaccgagccccgactccgccgtgtcctcatgctatgcttcccactgagcccatcatcctcttccttgacgggtttgaacataaacggtggcgggtccacgggcttctcaatgggcgggagctcaccgtatttcttgaagtggatgcgacagtcggtgcaaagcaggatgttctcccggcctccgtggtgccaatctttggaggctgtgtgagggaagtggtgggggccaaccttggaaaccatccctctccctggggatgtctgggcagaggggcccttctgtgggctctacccaaacctgatgccaccagcaccatgcagccctgggccccaacaccccagggctagtgctgccctgctcccccaaggccaggagagggtttcaggggcatctgctgcccacttcaacttggggtgcccaggaaaagctggcagcaagctcctgggaactacagtgtcaaccccccaatcccactcaatctgtcctgcctaccagtcagtattccataccgactgccaagcagaggagtaaagtaaactaaacatttctaactttctcgaatcccgaagcacaatgcaaatgtcaaatcaagtactgtccctggcaggtttccagctggatgcatgaaatgttcagaacatggaagtgcttgtgcccccgccccgccccaggagcgtgacgaggccacttactggtggtgaagcagtggcggcaggcgtaccccttcagctcctgctcactgtcctcactgtcgaagtcatcttcactggctgaacttaggtccactgggcgtggcaggcacatagtgggggtgggggagacaccatcatgctcagccaaggctgggccggtggggtgggggggaggggggaacacctgtgacctctggcctactgcaggttctggccaccagtcagagcggctgggtgcacaggctgaggtaggacagtgtctgcaaaggaccacttcgagctcctcagtgtcagtcaccaggacagagggcctgtgtgtgaggcgccatacccaagggcctgccctgccactgatgcccgtaacgggtgagtctgaactgggacaagcgcgtccatgctgcctccctccctaatacgcccaggcaatcctgagaaattccaacttcaccgagcgcccccaacccgtcctgctaggtgatttctagtcgcctgcatgcgcaacaccggcgcccctcaggttcagcgtcccgggccaggacagagctataaggcacttttgctacaccccagttttttaggggtgagaaggtgtgggctccagcatcattagattgtacatcatactgggaccaaaaagaggatcttggtgaagcaggaggaaaaagaagaaagtgttaatctgatcttcttacaaccaaaagtgcaatgagaattcaagcaggacatcaagtacatcatctgtcaaatggaaaaccttcccaggacaaggccaaaaacatcccaggccaagacgtgtattttttgtaaaaacctaagatgatgttgagtttatgagaaatatttaaatgtacaaataatgttttaaagtctccctcctgaatccttgtcctgctccccgcccccaccatcggtctatgtttaggtcaggcttcacacatgcactggagcacgggtgcacaccccctcatgcttcccggagccatcagctcctacgggcccagagtgggacaggctgcccgtgaacagtctcccctccgcccactgtgatgccaagacccctactcacagaattcactggacgggggtctggagggtgtgttgacgggtgtggacgcggtgcgagtcttaatcctcctgaacacggcctgcctgcggtgcctacgatgggctcgggagctggctgcttcgggggtcttcttccaatagtaatagaaggtgatcagctccccctgcagaagagaagggctgactgtgggggagggcctggggcttttccgtgccccacgcaccctctctgccacagtggaaagctgggtgtttaacagctgtgccagagatgagaataaagaccagtcgctcctggagttgggagaggaactgggcttgcccaagaaacagccactgagctgcccgtggactgcatgaatggggcccgcctcctcagcccagcacagcttgacttccagacaccaagaacaagtacttgttgggtgtctgctatgtcagaccccaccgctgttgtacacatgggaggtacacatcatccacaatggacgaaaaggagagaagattcctgcccacgaggagcttacattctagctgtgtgtgcacgtgagtctgtgcatgtgtgtgaacacaacgatgctttctttacagtaatgccagtgaaatcacacaggtgtgagaaggaaatgcccggccagttagactcccccagaaacaaccaaccaaccaaagcaaactgcccaggtggtgaggaaccagggccaaacagaaggtggggaagaacagagaccgcatgctcaggaaactgctccacagcctccacctggctccatctgaaggcccacatctgacatgccggcacgacgtccagaggcaaggactgggcttggcaaagaaagactacaagaggacagacacacagtggtgctgatgcaaaggtgaaatatcacacaccacaaggtcaggcttcttttcatggcccagcagaaacaaaagcaagatacctttttggaaatatagcaaatgtaagctttttaaagaaagggcactttgggcacccccagccctcagggcgctgcaggctgccatctcaccctacacacaaaagacgatttcttaaacatcccaagataaagtctctttacctagaactgaaaaaaaaaaacaaaaaaaaaaaacaaaaaaaaaaaacccaaaaaacaaacacagccaagtgagagagcacagatcacttggtttccctctaattaaatcaacactgtagaaagtctattagcttggcgactagatgctgggagttgtcttggaggtacctgcaccctcactttgtctcatcaaacactgtcttgtgaatggaggaggcaaaaagagagaggggaaagtgagagagggggatggaaagactagtgttggaaggactaaaatagacaaaccaaacaaagacatgtagctgccacatgacaaactcacccatcagaccagatttcatccaaaacacccccagaggaaatggcctcagaacacagtgacaagagaggtgggcagattttaggtggtggggtggcttccgcaaggcaggggatgccgtgccttgagtacttgactgcccacagctgcatcttatgcctgggcatttttgtaagaagtgggaccacggctgcggtccctaaaggagggctggaatgccttgaaggagggctgactggcctataaagcccatcacatgtatctcctggagcactggacgtgtctcaacctccccaagcacttaacacttaacaaattactcctgatcaccaatacctagcagatgaagcataaccccaggccagcagggccagggagccatctcgggacaagcacactcatgtccctacacgtatgtgcatgtgcccacccctcggttccatgagatggtaactgaatgataaggagaaatgcagatactgccattggaatttctgactggctcctctcccccatgctagtctaggaatgcgagctacaactgtcccagcgggcatgagcatcctggcccctaaggtcatgatctgtgaacctcctagctcttttcacttcctgctttccagacttggaaatgcatttatctatactgatccttgggtgttggctagacggaaaagattcgtaaatcccactagggggttacaagatcactgctgacataaacgctgacttgtgtctggttttcctctgagaaaatatggaagagaaatcaaggcagggagcagtcacactccaaatgctctgtccaaggtcatgcttcatgagctcaaaagggcaactggtgctgtgataagtcacagctcaaattccagagcttgaaagaagaatgagaaaaaactcacagtggttccttctacttcctcagtccaagtcattttaggggctactgaatgataaaagcttgggatgtggccaggtgcggtggctcacgcctgtaatcctagcactttgggaggctgaggcaggcggatcacctgaggtcaggagattgagaccatcctggctaacatggtgaaaccctgtctctactaaaaaaaatacaaaaaattagctgggcctggtggcagatgcctgtatttccagctactcgggagtctgagacaggagaatggcgtgaacccgggaagcggagcttgcagtgagccgagatcgtgccactgcactccagcctgggcgacagagtgagactctgtctcaaagaaaaagaaaaaaaaaaaaaaaagcttgggatgtaagaagaaatgcaaagctatacgagacaaaagggaccaaaaacgggagagaaaaatcgagtgagaaggtggtacctgagcctctgccatgccttcaagtcttacctgaaggctgttaaaaagcagcaacctgacttttctaaatagcatttgtctataatgcaatattgctacacacagttataatcaattatttctatttatcaaatatatatgttttgaaatggctttaaaagatagtaacctgcagatcccaggttaagggaagaagccaggcgcagcagtttacgcctgtaataccagtactttgggaggctgaggcaggaggatcacttgaggccaggagttcaagaccagcctgggcaacatagtgagatttagtcccccacctcaaaaaaaaaaaaaattatctgggcatggtggtgtgcaccggcagtcccagctacttgggagatcaaggcaggaggattgcttgaggccaggagcttaagacaagcctgggccctacaggcccaatctctacaaaaaagtttaaaaaattagcccagtgtgctggtgtgtgcctgtaataataccagctattcaggaagctgagacaagaggatcacttgagcccaggaggctgaggctgcagtgagctacaaatgtgccaccgcactccagcctgggggacagggcgagaggccatctctttaaaaaaaataaaagaacacttaaaaacaagaagccagagttcagtgaggtaagaaactgccccatgccagacagaaaaaaggcttaactttcaaacctttgctcctggcttcactgatctctgccaacaagtgaaaaaaatcaagacccaaaagaaagaaatctaacattgaaatcaacatcaactttttgttgacacttaaagaagaagtagtccagaacagatttcaccatctgagtgccaaggatgaaaatgaccaggcaactggtttctcttcaaatcgaataaatctttcgccttttactaaaaaaaaaaaaaaaaaaaaaaaaaaaaagaagaaaagaaaatgaccaggcaggaaggactgtcctccacagcagtgaagtcacaggtggtaagaacggtaaacttacaattcaggaaggtgacagggtgaccagaactgtcatccactgctggtggaaatacagaatgctcaaaccacgatatctaccaaacaacccagcaattcttctcttatttacccaaaagaaaaaaaaaattctcacacacagactttcacggatacattcatagaaactattctatatatatatatttttttgagacggagtcttgctctgtctcccaggctggagtgcagtggcacgatctcggctcactgcaagctccgcctcccgggttcacgccattctcctgcctcggcctcccgagtagctgggactacaggagcccgccaccagcccggctaattttttttgtatttttagtagagacggggtttcactgtgtttgccaggatggtctcgatctcctgacctcgttatttgcctgcctcggcctcccaaagtgctgggattacaggtgtgagccaccgtgcccagccagaaactattcttaacagtccaaactggaaacaacctaaatgcccacaagcaggagaatggataaacaaataatggtatccccacattcactggactacaacttggcaattaaaaggcacagaccaccgacacatgcagcaacaccatgctgcatgaaagcaggcagacagggacggtgggtgctgcgtgagtccttcccagagatcacaaaaaccaaactagcggttgccgagagcctggagggtgggggacaagaaactaaaagaactcaggtaagcactccagggtgatgaaaatgctctgtaagttgaatgtggtgtcactgacacaaatgtatacagtggtcaaaactcatgaaactgtgtacttaaagtgggtgcatttttacggtattcataccatatatggcaggttacgtcaataaagctgaagaaaaacaacaacaaatccaggccgggttttattagctgcctctcaaccactgttatgcctatcaagggattcaacactggaatgaagcgagtctaggatcggaaatggcatattggtgactgcatgggtggcaaggtcttgagcacaaacaaaagaacatgtcggggaaagctctggttctacaaatagggagtgaagcagctagaggcctcgccaggaatgaagtcaattgaactttaatcaaacatgcatagtgtgtgctgcagagacccgctgcacataaattcagggaacaaaagctgttgcagaaatcaatagcttactgaaacattaacacaggcaatcattaatcaaaaggcagctccacaaaggcagccttgcaaattagctcctgattttgcctgcaagcaaacacagaggtataaaatgttgtcgacatgaatggcctataatgatcattttgctcctgatgctctcacctcatctcacaacaaggtctcacagtcaacatatcttatgtctcggtgctataattgcacacagcatgaggaactcaactggtttagtgcctgggcagaaatgggaaaggaagagggcgaagtcatctccaactgacagtgttcccggctgcagctcttgccaagagaagtgctcaaatccattgggctatatttagcagattctctctcctttcctttttcttttggcggtgggggggctaaatttttcccacaggtcatatgcaaaaagcctttggcaatgacaggagcttggctcctggacttaggagtctcttcccagcagaggtgtctttccaggctatacactaagatggagttaggaaaataagcaccattaggttcctttaatttcccacaaaaagaaaaacaaggggaagggagtgccacacatggaagagagagggaagaagtagtaagctgcttggcaccaggcaatctgggtgaagggccttaggagagaaggaaaaagctaaggatgcagagtcagctgactctgggcctagcggagggacagctcagcggcagccgctcctgccatccaggggcctgctgggctcaggccactttctcctcctcagccaccactttatttctgccccctccagggttaggctgcaagtctatcaagttcacacagacacaacgtaagacatcagcacaggtctttaagagctccctccgccgcctgggcaatctgggctggagcaacaggggccggggctgcctacctcctagaggctgcctgtacccatttcaggtattaatactggttctgctgttctggccaggcccagttctgctttatcttgggtaagtgataggcaacccgacccaggggccaagtgggtgcccctgtgtatgtgcatgtgtgcacagatgtgagcagggtctcctcccaggctttccaacaggccaacttacctgtgcgcatttggtaaactaaacactatccaccaacacaactgctatttaatttcccacaggcagtggaatgctacgggaagagaacctgtaacctgtcctgtgataagccacatgtcttctctctctttaggggcatgggggagtgaaagagtagaagagattgttgaagaagaaggcactggaagcattttgactataaaaggctcactcgtagcaagcatgcctgtttcaaacagtatggggcccagcttctcttctgcccgagcccagcatgaactgctcagacaggatcctctgagaagctgacatggaggcaggagaaggttaaatcaatggtttctgctgtcccatattagaagcataagggtacacccaagattgagtcccactttttttggtaattatatcattattaccacatcacccaagaagtctggacactcccctgaggaaggggagggagtgcaatagaagatgaggtctggagactcccacacacggtatccagggtgtctgcagcctgccacctaccatcaggtcgtgtgtgtgtgtgtgtgtgtgtgtgtgtgtgtgtgttttaaattaagccaaagaaggactcagtcctttgtaaataaccgtatgcgcaccccctttcgattcagttcacagagaacagtgagaatcttccactgtcacaacacagttttacgaccaacagcaaagaatgatgaggactgctggccttacggctatgttaaggaaggccctggaacaccagtttcctgcctccttgcccatgcagacagaggggagatacaggcaggcaggcatctaaaccagatccctgcaacgtcacatatgcccaggctctggccttgtgccactagtgagggtcagctgcagctcctttctttttcacaaacgaagtttccaatgggcaccctttctgggccatgcatcgcccactaaaaaggagggggcagtcggagagaagggggatgaggaggcaggcctggaagcttctcatggataacaggattataaacacaatttctttccgaagctatttcacaggtcttcgaagcccacctaccactgtcagctgagcagactgtagttacgtgatgggacaggagccaacaggggcagggctgctgagtgcacatccttgtacgcacctgaccccatcgcagagtcttagaagtaagcatttagaagaaatcattttaattctttaagacacaagattatctgttcctatggctaaacaaatattttaacatgaatacagaaggagcagctaaataatctctacacaatgccttaactctcggtgctaatgtgcaattagagtcagaatgttgttcccctgcttaaacttttgtttgaaaaaatgccccacagtgagcatctggctccttctttggtggtccacgtaaaggggatgaagaaatccaccccttccttactgaagtggagagatctaaaacttttttttaaggtatgttttttcagggagaaatcccagcaagcaacaaataataaaaaacaaggcctcaaattatgtagggcagagagggagaaagaagcatggtgtagagctgcttcctaaacccgggcccagagagtgacccaggccatgaggaaagagctgtggccctgagagccggtcccaggaagtctgcatgcgacgctgtcccctgaagagctgccctaactggagtgctccaacgctgctgccgagtgcagtcaggaacatttcctggcatggaatcctatgcgagtcattctttcctttccctccccaacgattcaagggctggatctgacaactgttcagaacatctgaggtgagaagccgggcactgggcagaaccagcagcgatattcaggagcagccaccttctacagatctttttccaggaggcaaccggttgtcttccagtaacaactctggtaattaaagcactgttctcctgggctccttcttttgttaaccaaccgaatcctctaatccctaaaggagcctggcactgtcagcgggctctgctgctaatcgttaaatatcacctctgtggtctctgagtgcagcagggagaatgatgatctgcttgaaggcacacgcagagaagtggaattctgaaatctcagcctcctacgttcaagaggccgaagggctctgatctaaaccgccacccacgaggaagcccacagtgaggaggcagctgcctccaggcaaggcagtccctcggtgccacctccagatcctcttctggggaaaggcaaagggaaaggagggaagtacgtgaaggtcttgtggctttaacttgtaaataggtggggccagtctaagacactcatgaagatgttccttacccaggcacctttttataacattttaaaaaatcagttaaaaaaaattttttttttaccactacatttaccactccatttgtacagtgcaaaggaactgcaatagctcaagatttctgccaacactgaacactgtaatgagatttcctaagctctgtgttgttctggtggatgaactcagccatttgctaatcccaccctggccccacacctccactcagacgtctggacctgaggtcctgccacagctcttccctgggccggccctcccatgctgcacacagaccaggtgagtcttcccaaagccccgctagtaccttgccacttcttctccaaacggtcaaaggttcctcagggcctaaggaacaaaggcccagctgcttgactacttcttctgagactttctctgtgttaccggaagacttttctaccatattcctttctaccatattcccccgcctcacggcctttggcttatgtcaaacacaatggccagttttctgttcctcagcactctcctgcctgctgggtgagcccctgagccccataccacccccacctcctcctctgtccaggccctgtagtcctcctcatcactcaggactcaattcatcacatttgctgccttcttctccatgaagccttcccttcacttcactcccccaccactggatggcatcatacaggtttcactcctacatcttttcattcccgcctctgtgctggcacagacaggcttccctgtgctgtaaccatacatgggcccacccaacttgccaaagtacgtgctatctcatctgtgagtaccccacaggtctaagacaacatcttgaataagtattcagtaaacatctgatgaaatgattatttctggagaattaaaattcacctgaaattaaaaggataaaacttttgagaaatggataccgaattgccactttcttattttgccatgtaaggtcattagaagtaactgcctcctgatctcatcattattttgtaaaagaaatgacattttatctccaaaaaagtaaacagaaaaagttctttgattacatttactgttaggaaaaatggctacatttatttcttatgggccagtgaaaacgcaatccacatgccgatgtttggaagtggctgctctgaaggtgagtatcatggaatggtggcttaggaagccactgaaaatgcttcctcactcagcagccactgaaaatgcttcctcgctcagcagccactgaaaatgcttcctcgctcagcagccactgaaaatgcttcctcgctcagcagccactgaaaatgcttcctcactcagcagccactgaaaatgcttcctcactcagcagccactgaaaatgtttcctcactcagcagccactgaaaatgcttcctcactcagcagccactgaaaatgcttcctcactcagcagccactgaaaatgtttcctcactcagcagccactgaaaatgcttcctcactcagcagccactgaaaatgcatcctcactcagcagctttatttacaaacaagcaaacaacattttactatgaaatctacaataactaagctaagccatatctttttatatcttaatatatatttatcttttacatatactttatcttcatctttatttatattttatcttcacagactcccaaatagataaaccttcattttccctgctttacaaatgaggcaactgaagcacagtgagatgaagccatgtggccaagctcagtttcaatgaagtctaacgcccttaaccttagactctgctgtgctgctgctctaaaacgtttgaccatcatggtttaaagcactaagaggaaatagccatctagatttttttaagtgaggggggcaaatttgggctatctttgatctctggaatctctggagttcaacgcaatagcatcttaatcttcatacctggaccttcgcagttatggctgaggagcacaaaatatccctgtgcctcctggtaataacaggatgccagccttcccagctcagggtagagcccccatcccagcacccatggactacagaactgcacctgcttgaagcaacttcaggggcacacaaatcagaagcacatttggtagccatgagtgaagatttagaattatgcacatgtctatagaaacgctttctgcttcctataccaagaacaacctctatgacgacatgagacagacgctgggagcctacaaccatgaaccctccccacctcactacctacttaccatacctcacaccacccaccagcttctgatacaggagaagccctctggcctacttttggctctaggcaacatatgtcccagaaatgtgccaataagtggccttcacctgcctcttgatccaaaagcagtgatgcctgagtctagataaggtagagtccctaaagagatacgggctctgcccaaaaaaagatgtttgcatacacctactatacaaagcatctttccaaactgcttccagctagaagtatctatttaaatcagtggttctgaactgcggctcaaaaccgtacaggtgttggagggatcccagggtgggtctgctgaacctctatgaccttgttgctacccactgcaagcagatctattaaaaaaaattatattcattgatcaagcaatagataactattggtttccttgtttgtttgtaaataaagctgctgagtgaggaagcactgacagtggcctaacttcaacttaattaaaaaataatagtaattaaaataatttaaaaataaataaataacagatttggaaaccactcatttgaaggcaaagattgaggccactgcaaaacagtctaaagctcaggctgaactgaaagactcccacgacatgaggggaatcaccccggcctctggcctggaagccctgggcagttccaacacaatttcacttacatggaacccacacacacaagggcccccttggaggcttgtatttctaaacctcttggaggtttatttcttgttttactgaactgtttgtttaaatataggatgtaaatattttaagtgtaataatgctaataccagaaaaatcttgttttctcggtagagcctcccaaaccctaagaattcatttgttgacatcacttttctttcccacaagctgaacacttcattatttcctgaattcattttattagagttcagaaacagggcaagtgggatttcactgccgttggttctatcgccacctcacctttcttgatgttttctaccagcaaagggggaggagacgaaagaaaaaacgaaagccataaaactgttaaaactaccattctctatctcgtaaacatttttctatttattggcctttcattatatgtgcaatcttattatccctgcacagcatcaaagtgacatccgtcagggtcaccttataaaatatacatcggcaatgtaacgtttaatgacgggagcgggacgaacgatgaaggatgagagagcgaggcctgccgcaggacgtttgaaagggatcatcagttatatctgtgcatttcccgaggtgataattgaatgacaggggctggagggaaatccatttttgagctcagaaaagatagttaggagaaaaatgtttttgtattggaagcatgtaatgactgccaggaaatgggaacagctactctaacaacacttctcttatattttatggtttttatggatgcacagcaaattatcatgtataatccatttctgcaagttgaattttaaaattgctcaatacaaagaaaggaaaagaaagggtacttaattttctcactgcattacctttaataaaaggagcggaaacaaaaattacacttcaaagcacaaaaacacaagtacagtaccgtaccctcttcaagatgtgaaatgtctcatctctttcacctgaattttggacttcacctaaggcaaacatcttagaaaaattcaggcaagcctgcaaaccaggccctggcttctctgtgctcttgtgtaaacgtgcaaccagagccctctagcaaagaagctccaggaaggaaggggagagactgcagctgtctttatgcaactgtattggctgaactgtgtcctccctcaaattcctacgttgaagctctaacccccagggcctctcaatgtgactttatttggagacaggctcttccaagaggtgattatgttaaaatgaggtcaagtgagccctaatccagtacgactggtgtccttataagaagagatgaggacacagacacccacagaaggaagaccacgggaagacacagggagaagatggcatctacagccaaggtgagaggcctcaggagaaccaaccctactgaactctggtcttggacttccaacttccagaactgtaagaaaataagttctgttgctgaagcaacccagtctacggtattctgtcatggcaaccacagcagactaatacataagcctaaggacagggcttcatggtgagcctcgaggaaaggagaggaaccagcagagaagtgaggcctgctgaatgaacctctaagccctgggctgtgagacggggctcatggagctgactgtcagcagtgaagatgcagtctgctgggggagaagaacaggtgccaaagggtagagtaatgtgggaaacagcaaaataattttctactttaagtggggccaaacctcgcagcttatcctagcagctctaaagggcaaatgccacacagttccctcacgacggctgcattctgacccaggagaaccagcccaactccagaacagctctcagatgctgtggatctaaagacagctggctcgcgtgaagggacacgggggaaggaagagaaccacaagatgggaaggaaaactgctgccagcagaacacaaaggaagaaccctccagagtctctgtgggcctgtttctgaccacttaattctggtcagtttccacaggcaagagcccagctccatggggctgggcccgccccgcacagcctcccatgaagctgcgaccggggaaaggagggtcatgcagcccatacttcacagacagacaaatgtgtgaggctctctgaccaccacagctctgtggttccaggggtttccaagccactgttctgggttcctcacatcaacagacacactgcagttgagaaaacacacacaacgggaaccaccaggggttcgggtgtaatttatgaaaacagccatggatctccgaatctgtgactgtgactgtgatatgggctccacggattctctcctggtccatatctaggtctcctcaaaggttctttacagagggcggctggctctcccttaagaggcccaggaagtgtgggactggcagcgccaccccatgcaggctgctatgcatgtggggcccacagggggcacgcgggggtcactgtctagagactctaggaaaccgctccctactccaaagggaatttgcaaagatgatggggctaactccccagaggagagccaggagctcccttttccatttaacacacaagttgaatgccagatggacctagatctctgcaacacgctgtgtagtggggaagcctgcggggctgggtgggatcacttcacctaatgcagcacgtatgccacaaactcaccacagcacaccttagcctgcatcaaatcctggccgctcctgttctggagacaaatcaccactgttgtcatgatgggtgacctcagtcaccccactccaacgcccacctcacggctgacatggcatgtggcaggaggaggtatgtcactgtgctcccagaacataccataaccccatccctcccacccatgcatgtttatgctgggattggtctgtgatgcaaaggtgcccttggccctctctcgggaagtaattttttccttcatgcccacatggcaaaaggcctgcctctcttggcatgagaatctctaacagcctcagagcaagccatgctgatgatgagctctgcgtcctcactgctcaagcctaggtcccagacacaactcccaaaagtcaacaggctttttttttttttttttaaacgaaacaaaacagagccttgctctgttgcccaggctggagtgcagtggcatggtctcagctcactgcaacctccacctcctgggtttaagtgattcttctccctcaacctcctgagcagctggaactataggcacgtgccaccgcacctggctaatttttgtatttttagtagggatggcgtttcaccatgttgaccaggctagtctcaaactcctgatctcgtgatccacctgccttggcctcctaaagtgctgggattacaggcgtgagccaccaagcctggcccatcaagagcttttttaaaagcttgattttccagctgcagaaagcttcagaaacttttcaacacaagtcaaaatcctcagcaatgaaggagaacagaaaggtagagatttctctttaaggtgacttcagacttgagcccatagcccaggagcccctctgctgatgaaggaaccaaagtcagggcagagaggggcgttccagagctggaccttggagtcctggtcctgaaagtgctcagcgctgctgtaacgtctgccagggcttgggagcctccatctcctaccacgttcggcttcttgagtccttccctgggtaaaagggaccaatggtttttcccacatgtcctgcctctgaccccaggatctccttgggtgcagacacctggaacgccttctcctggttgctgctggcccacccctccagctctatgtgctgtcatccacaccacctcatacacactttactgacccataggaagcgagtttccgatgcgcctgtttccatgattaccaactctctcactcagctgtgacctttttgtggctcatacatcactgagtcctgcaggatatcaagttatgtctataacatgattcccctcctccctttcctccgactggactctaaactgcaagtgaacaggggatgtggccactctaaaccttgtaacctgcgcaatcattagcagagtgcctgacacaagatgggtgctcgggaaacgctaacttgaactgagatctatcacagacacacagacatagaagaattatactgcaccagaaatacataaaacagaggagtcactaacagtcataaaagtgaaataactcagtttcagtgataagaaatttggaaatctttcagtgaaccatttcaaaattgagctaaacacacataggtggaaaattagttacgagaatcaaaattattcaaggtaattattatttcccttaatttatctgtacattaaagtaaaaaacaaaacaaaatgaaaacaaaacacaaagagtcccttgatccatttaattagttaaggttactctcaaaaatgaaaatgatttccccagccccggggacgcgccagtgtgaaatgagaacaagagtcttacagggagtgttcctgcacatacacgtatgcactaatgtgcgcttggaatttaccagaacacacgtgttttttgttttacaaatctatgatgaaaccacacaggccttggcttgacactgttccaggggctaagtcttaacctgaattaaccaagctgcactgtggtccaatgacactttggcactaaaagaataacttccatttttctgaggctgagcgttttctcatttcacgctgtgagaatcctctggacctgccttaagagcactcaggaaagtggttacagtcaaaatcttcctctaaggattagtaataacacaggaccaaagctcaaaagcaggagaaagtgagcaccaaattccttcagtgtgctggagcacatagagacttcctgcaggcagatagcaagaggctctgggattatgcctgcaagctagccatgctgctaggctcttaacaaaacagaacaaggacagcctgctgagctgtggcctgaagcaccagtaatgacagctctctgccaacggcagtggtcaacacttccaccagcttggctccagtgatctcaggtccacctttgtgcccacaagtatcccaatttcttcaggaccaggtggcactctcagctgcctccacatgaattaacgaaactcaattcgcagcttaggctttggctcagccacgtgcgcatgcgtgcgtgtgcatgagagagcgcgcatgctggggaagaatggagaaaaacaatgaacaaacattgactgtctagcctttttcaactggagttcttaaaatgaagtgactattaatattttctcaattctcctatgaacggaacataacaggtacctttctagatgcacaggcaagacgttactacgttacacacaatggatgcccggcttctgaggcttacctctctcagaactccgagtgagaacagctgccactggctgcacgaccttgagcaaattccctaacctctcttggcctctgtttcttcattttaaaaatggagaaaaaccaccacaggaaggttaaggaacctcctcgagactctccttatctagaaacctgggctgcctcgccacgagctccctcctttatagggttgtggtgaggatggaagtgccaaaaaggagccggcacacatgctcagtaagtgacaggattttttcttgaaaatccttttccatctgggaaaaggaccagaaactcagaactaagttcaccttaaaggactattttaattgactaagttaaaaaaaaaaaaaaagtctttcaaagaatggtttctgcaaccaacttccttcctctatcatgtttcccctagaacgacagtgccttatgtagtcaaagaataagagaatgttagagatggtgaatggtaatggtgtctgggcctagttcacaatctgaaagataagcgctggtcaaggagaagagtattctgtctgaagatctcagctgcaaccagcagaaccataaatgcccaacagcccactgaggccacctaagaagcctgtctccacccaggtccagcttctctcttacacaatcggcaacagaatgacgccacacaagatcattaaacatttcagcaggaataaaaacgaaaccaagagaatgcacctgccaatctatatcaggcaactatggggtttgtgagccgtccttgcactttaatgcagaattagctttgatgcacagattggaaaggtccagcttaagggacttagaacatcccattatttaattttatgacaccatcactccactcttaaatgtgtcgaagaacatacacttatgttacaatttatgcccaagggccaggtgcggtggctcatacctgtaatcccagcactttgggaggctgaggtgggtggatcacgaggtcaggagtttgagaccagcctgaccaacacggtgaaactttatctctactaaaaatacaaaaattagccgggtgtggtggcacgcacctgtactcccagctacttaggaggctgaggcaggagaatcgcttgagcccgggaggtgaaggttgcagtgagctgagattgcgccactgcactccagcctgggtgacaaagtgagactctgtctcaaaaaataaataaaataaaataaaataaaataaaataaaaatgtatgccaaactacaatgaattctattgccgaattttaaaaatattcacttatgataatgtggggctcactagagtgtcacaaactccagaatgaaaattagtggcttagattacaaactctcgtagtagaaaggtctaaagactctttagaattaagcttgaaagaatctgtgtttctgatgctgagaagagcatagggaacaggttgtacaatcaaccgcctcaccccaaagcctccttgggtccactgcttcctcaggtcggggtcttactgtttattccacatcgtggctgtccctctacccctctaggctgtgtgactgggaacatgtaagctgggatgcacggaggtccagtctctccctgagtcatgcgcatcctgttcctgctgccctagttttttcttgtgggatacaatgtcagttctgtaatctgtcccctctgtaggggtaaagagatgtgctgacgtgctcagaaaaggaacatgcttctctggatgccatgaggtactaaaacacctgtatcttaaaggggcattaataagaagagcagggatcctctcctgggaactcaagcaatcatttaaacagtgctctcatacagcagcaaataaagaggtaaatgagatctgcttaaggtaacagcaaaggtgagcggttgtatgctaactccagataggagtgatgaatatctgaactgatgaatatcacttaaaaagtcttgtcacatatgatctggatcagaaggctgtgacatcacaaccagatgctttgaaggcattttctctgctccctctagttacagacaattaacagttctgtacactcttactcatctgttccagaaggctactaataaagaggttgggctacttgtttttcactcccagctaaactttctgtctcctgctgtgggcaggaatggcagtggcatgtgaccagcgttcctgagtggcagagggcaacagctggccatcaacatgccagtcatgggcacagctctcagccgatgcaacaaccacattgacttcaaggacaatctaaaattgaactcaaggcagcacctaacaagtctctcgtgcttgcaccttccttctgggcccatctaaaagcagctctgcagggcgatttctgccagccacaggtcctgtgtcctccatcttccttccttggaattcctagcaagactgagtcaagcatggccttgggtctatgctgttctttatgggaagcaccgaggaaaatacatctcttgaattattctaattgtatcttagaatttaacatgttcactgtctaaaatcaaaatgagtttcacatataaatgggcaattgaattaataatatcaacacccatcacagtgtaacaaataacttgattattaacttctactgacagccccatgcttccttcctcaagagtttcagactgcccgtttgtgctttgtgcagctagagggttccgaactctcaagaggcctcagggaaagttgactctgtgccttaagcagaaatcacaactgatccaagggagaccctggatgcaactgcaaaaaactgaatggtagcaggggcaggctaccacggagttttaaatcctgccttacattaacacaaaggaaatacaggaattacccagatgccaaaaggaccctgaagagtatcagataatgatgtacttccagctcctggtgaccaaacaaaacaatgtaacaaaacacaaccaactgtggcctcagaacgcctgaccagctacccggagagcttttatttcttgaagggaagccttctaccaaacaaacaaacaaacaaacaagaaaacaccactttggcggatggatcactaggtcaggagatcgagactatcctggctaacatggtgaaaccccatctctactaaaaatacaaaaaaaaaaaaattagctggacgtggtggcgggcgcctgtagtcccagccactcgggagactgaggcaggagaatggcgtgaacccgggaggtggagcttgcagtgagtggagatcgcaccactgcactccaccctgggtgacacagcaagactccgtcttaaaaaaaaaaaaaaaaaaaaaaaaaatatatatatatatatatatatatatatattttttttttttttttttttttttttcttggttcacagcagtcaaaagaaccacaaaggagcagtagtttctaagcttccatgtaggtgaagacaaaaatttttataaatttcatgaatacttatatcccaactgttcaaaatatcaagatatttaagaaaacttgtaggactacagttaactattctctcctccaaatttttctttagaatcagagagaccaaaaataaaaaaattaaaaaattaccattgctcctatataaatcataagaataaaatagagccaagagaacttcttaggaacccctctcatcccaagccaagagattcttcccacattgggcattatcaataatgagaacattcctgagatcctatgagcttgtgtggccctgtctcataaagacagtaaagccacacaaataagggtttccactccctgggcctgagctctgaaacccagccaagacagaatcccaaacagccagagagcttcctttctgaaggcagtgaactgaacatacattatttaagatgaatatctagaactcttacaaatgaaaaagaaaaggacaatccattgaaaaataagcaaaagacttacacaggcccttcatgaaaaagaaacacaaacagccaataaactcattataggatgcccaatatgattagtaaccagggaaatacaaactcctcaaatgcccaaattctttgtgttggattttcaagtaaagtttacctcaaagagttaacacagaagacaaaggttttgaaatctactatatattctctcaggggaaaagctgcaactttgggtgcagaagtagtgtgaggaaaggaaagaggataaaaatatgacttgaaaggacttcacaaatagaaaaaagacggataaagggaacgtactcaaatggattcaacactatctcattcaaaatcccagctggttagtttgtggaacaagacaagctgattttaaaaattttaaagaagaataaagtgccactaatcaagacactcttgaaaaacaagaaaaaggtaggggacctgctaagtcaactatcaacaattatcctaaagctagacagtgaagcactggaatagacagagagaccaacagaacaaaacagcttagaaacagattcacactcttatggaaatttcactttgacatagctggcaacacaaatcagtggagaaaaggctggacttctccagagatgacactgggacacctggtgatgtattacagaaacaagtaaatctggtctctttctttatgctacacaatcaccaaacccacggactaagaacttaaatacgaaaagcaaaattataaaacttttagaaaacagtaagtataggagactgcctaaatgaccaagagagatttctaacaaataaaagctcaaagtataaaggctgatacatttaaggagagaggataaaatcgttaaaattaacaacatattaatctttaaccaatcataaaaagtgtgaaaagataagccacaagccagaaggtatttgcaacacacattatttaagatgagtatctagaactcttacaaatctagaaaaagacaatcaaattgaaaagtaagcaaaagatttatataggcccttcataaagaggaaacacaaatagccaataaactcattaaaggatgctcaatatgactggaaaccagggaaatacaaattaaaatcactcagacatttcaagtttataatgttggtaagcattttaaggtctgattctatcaagtgttggctaggatgtgaagttactggaattcttacatacagctggaaaaacaacaatctgcttttcttggtaaaatagcagatacgcatacctgtaactcaaaaattgtcttaactataccctaaagaattcgtgtgcatgtgtgccagttgatgtgtgcaagaaagtttacagcagaactgtatgcaacagcaaaacactggaaccaactgaaatgtccatcaacagcagaaaagagaaggaaaagacgctctattcatacaaggctgtgaagtaccacaggatgcagagctgcctctcgggataaaggggaatgaaaacagcaaggtgcaggacatttttcctccatgactccattcataggaagttcaaagacatgcaaaactaatatactgtgtagcaatacacatatatgaggcaagccataaggaaaaggaggggggttatagcagaatacccagtctagtggttatctttgcgtggaaaggacaggggattgcaccggagaggaaacagtctgtgcaatctttttttttttttgagacggagtctcactctgtcgcccaggctggactgcggactgcagtggcgcaatctcggctcactgcaagctccgcttcccgggttcacgccattctcctgcctcagcctcctgagtagctgggactacaggcgcccgccaccgcgcccggctaattttttgtatttttagtagagacggggtttcaccttgttagccaggatggtctcgatctcctgacctcatgatccgcccgccttggcctcccaaagtgctgggattacaggcgtgagccaccgcgcccggcccagtctgtgcaatcttaagctgcgtggtggcgacagttcaccgtgtggctgtttttataccatacacaaatgctatattcttttgtaactcttcaatatttaactaaaaaaaatttaaaccagaagattgtcaaatatattccaattctgcatttaaagaaaggtttctcttctctacagataatttggaaatgatatgcaagtgcttccttgctcattagacagctaggtaaggggtttaatgacttctcttccacctgacctcacttttcccactgccacctgcccgcccactctaaaggtgctgtccgagctccacagcacacccactgcagggatactcccacttgggagcacacttctgtgtccctgctcttcaaacccaaatgacctcccttctctttcttaggatcactgttttcctgagtattgtattatctttaggaaagtacagtgcttatgaaatgacacttcttagaaagacatgtgtcagctgggaagggtgacatgaaatcttcaaaattatcaaaatcagtctaaaataagcagagctgtgcttctagataaggccgaaaatgactactccataggtgtcaacagtctccaaatataatctacagcacaagtagcctcaggggtatgaagaatatgtctgtgaactcatgtcaacccactctcatgtctgtgtaaaacctgaaaaactaaatacatacacgggaggtactaaaaccttcatccccagcatccactggcgtgtgacgtcaacgccttgttctttattcacggccatttcagaaacctctgtgccaccccgtccatttacttctagatttctgctgctgtgcggctcagtggatgcccctactttagggaatcccagcaggcgcaccctagcacgaaaagccaaggtcactgtgcctcttgtttacaacaacacaaaaaaggtcttaggcaagacccccctaccgccacacatgctaacaaaaaaccatgaggaaggggtggaattctctttggtaacccatgctttgcagtcaatttgaggttcatgttgggaggagaagtcggggagccaccacggaaggtcgcatggagggaacctcaccacttccctctataaatgaagccccaactgtagtatgcgaataaaacaatccgtcagctaagtgcacgttgttttgtatacattaatagttttccatttgtgaggagaaatcagggcagcaatgacgaccctgtctcttaaacgcatccacttctgcaaacagttcatcacctccaaccaccaatggccaaagagtatctcccctaggatcctgttcaatctctctgtggacctgtcaagacacaaagccaaactagactgaatttctctggcaggagtgaaaatacatcacgggttaagaacaagagtagttagacagtgaggatgttaacataaggaggtgggcatgtaccagaaaaaggaaaaccaataccagacacctaaaatccaagacctagaaacagtcatcctgtgacctgaagcagagccatgtgccacaaccaaccacgccacatctgaacccagaggcatcctgtgacacatctgacaagaacgacggcatacagaagagcagagaccccactccagacagctacactcatgtacagagaggcctttggcacatcttctggccagtcgtcaccccaccccaggtagggaagctgcttatttggagagtggaaaaaacaaacctggcatgcatggttcagcgccctggtagttttgggagctagctgctctttttgatcctcttctccagggtaggctcttcccctgcccactaatctatgtcccatagtccgaactgtatcaataactataggtaatattttgaacccatctctctttcttcagaacttggggaaggaagaaggggcactaatttatcagcctcattcagagacccaaacaaatagtgaagacagagccccagaaacctaagtccaaaattctcccaactaattcctttctatctagtaaatattttaaaactatttttaaaaaatcatatttatccagttaaaaactatgtacattttgaatccattcttccataaaacaaacatacatctcaaaaccagctatacaagagggaactcctgatcttcacttctccctcctaaacttacctccccatcttaacaagcagcacttcccctacccagtggctctgtgccagcggggggtcctccctgacgctgtcctctctgatttgccacttctgattcaacaccaaatctcaccaatcctgccttccaaaatattatctcaaaaaaacaaaacaaaacaaaaaaaactttacttctctctgcctcaactgccaccaccctcatccaatctcggggtcaccttccatgatcacactgactcctacctggcgctcagtttccactccccttgacctactacaacccaaattccacactgtgtcttaaaaataacaaaataaacaggaaaactgatgttacttccctgtttgagattccttatcaacttgtcacattctcagcacaaaactctagcaaggtgttcaacagcatggactttaaagccagactgcctgagagtaaatcccagctatggtatttccaagttgtacatacttgggtaagttacacagcctcctatctatgtggtcaatgaaccgatgtatgtaaagcactgagaacagtgcctggcacctgagaggccctcaggacatcctattactgccatggagcacacaaggtccccatgacctgacctctccccatcactgttacttcacccctctccattctcctttttgctccacacactccagctacacttactttttcagcttcccctgagttccaagcctatccttctccagggcctctgtacaggctgatcccttggcctggggggctcttctgattctatccttccctcctcatctctggggtcataactgaaatatcttcagatattcctttcttaagttaggtccccctgttatgatttctcataatactcagcagatttccattattgcacttatgagaatttataattatatatctaattattcacctaatctgtcttcttcatagaattaaaattctagaggccgggcatggtggctcacgcctgtaattccagcactttggaaggccgagacaggtggatcgcctgaggtcaggagtcctacaccagcctggccaaccctgtctctactaaataatataaaaattggctgggcatggtagcaggtgcctgtgataccagctactcgggaggatgaggcatgagaatcgtttgaacttgggaggcagaggctgcagtgagccaagatcgcgctattgcactccagcctggacagcagagtgagactctgcctcagaaaaaataaataaataaaattctagaaaccagggaacatgtcttttgtttattgctgcatttctcacaactcacacaatgttcagcattctacagatcttcagtaaatatctgtaagatgaatgagtataaagaaatctaataacaacttgacttaccttgtaaagaaataacctaaaaagccatgtacatgctcaagaggtttcaggttaatgactcattcttgagaccaaaaaatgtcacagagggcatttgtaagaaatagaaataaacaaaatacacaattgaaaaaataaaaaaaggtgaatctaacaaaatccttttttaaaaaaatccttttatgcttatatttttacctaacctggaaaatgaatatctctatctatatatctctctgtctatccatctatctatctagataaaaacaaacttagccaaaactttttcctctcccctgggtctcattcttcattcctagctttctaaaaattcagcaaagacaaaacatttgccttttcctatcaaccataaacacccactttgaacacagccagtatctacccccacccctccatctaggagctttaattatggccctgaagtacgcataactcacactagcagtagagtccatctatgagggacgtggaggccctcaagagatatggtcagcatctgttacgccagcacaccagagcaaacatctgctgcaaggttgtgctgaaaacatttctatcaagtgggccatcctgtctggaagattaccagccctggagggatgtttgcgagcaaagtttcagctcttcgtgaagcagccctctgaccaaagcaagcgatacagagtgctgcagagaacacgatgtgcattctctgggggcattttcaagggtttccatttcatagaaaatgaaaggattctaaaccatgtagagacggtggaaaatatagttggatactacccaatgaagatgtgcaccaaaataccatgatgaagtttatcctgaaagtaggagaaggagaatgtggtgggcttactcatgagaaggaatagcaaggtgctcagattggacttctgcagggattcgtccccaagttcccaaagactcaacctaccaagaaggaggctactttgccagaaactgtcctacactttatagtacttgatcttacctttccagatgtttctgtgaattttttagtctagtgcaccatcagttcaccaactgctctaggaagatccaaatacaacagttcttatttccgcctccatcaagggtaataaatgccaagtaagatgcagtatcctatttagcgtggcctgtgtgactgggggcccaaagccaggaaccatagcatccacatcatctgggcctttctgattggaccgtagcatgacaaagagcagtggcttaggggaccctcctttctcttgctgactcaatctaaactgctctgggtgagcactccccctttccaagtcctgtttaattctactcataaaatggggttggttttctaacagctcaaggtgttttaagaataatacacagtgttcataaagcataatgggcatctcccaacaaatggacccaagcgcaggcaaggtccatttctggttatttctgttatcaatattatttgaaaagcataggtaagataaaatagcaaccctcaactctgatgcatccagaactgggcaactacataatacagagacaatttacatgaatgaaagtttaatggcatcaaatcaactatggattactagtatccaggtaaaagtaaaaactatatagagttgaaaatgttgctaagaaaatatattaacatataaaaataccttttaaaacttccttcattttttgtttataatttgaagggcaattagaagcttcagatgataggagctcaaggcccacgattttgccatgaaggctggccacctccaatctccacctggggacttaaaacactgcaaaatcctatacaccataacccaagaaaaatccctgatttctccactaagggctcctgagaccagaaagacaagatgaaggatggtgacctatactttgggaaaaccaaattagctgccatttcttgacattctataatcccaactttcaatttctaatgcaggtggctctaactgcacaggtaggacagagctgaaatccaatgtaaacagacacaattcatcttgcacacaacactatacagagctttccccattattaaaaagcttcaccaaaatcttgattggaagtatgctaaacatactgcccacaattccaaattaaacaattttgagaaatatttcttgcttttcagattctcaaaatatttgaagttcgacaactacatacaggcaagatcattctgaccatcaactactcaattaattctcactactgtcctgggaagcagataatattatcaccattttatagatgagaaaactaaagcacagagagatgaaataatttgtccaaggacagcgggagtggaaaaggaattcacacacatttccgttttccagtaatttaacttaagaaaggagctactgcagagaacaaacttatcagtcatggaatcccacatcactcagtgctggagagggggaatgagcaacaaaaaagtgacaaatcataaggtctgagtcccaactctcagccagagtcacccaattgcttcagaagactgttaccccaaggaaataagaaaaaaatacgttaacttgctctgtaaaccataaaatccactactagtatatatatatattatatctccatgaagcacttaccacagttacacttggtttttgtttgcatttcttagcaggtgattaatactttaaggggagagaaactgtattactcatttttatatcctcagcatctatctaaaatgtctttcccatagaaactcaaacgtctgttgagtggttgagtgagtaaataaatgtaaataaaataaaaaagaaaacatattttaagggccaaacagcccaaaggcattccatgagggaagtttgttactaaactttcagataaggtgtctagtatttcctgtaataagatattgtatattccccttctcctgcccacagaataaatcaagtacaaagaaactaaaaataataataccaaagaatgagcaatttccgggtcgggtgcagtggctcatgcttgtaatctgagcactttgggaagccgaggcgggtggatcacaaggtcaggagttcaagaccggcctcgccaatatggtgaaaccccatctctactaaaaatataaaaaattagccgggcgtggtggcacacgcctgtagtcccagctactcgggaggctgaggcaggagaatagcttgaacccgggaggcagaggttgcagtgagctgagatcacgccactacactccagcctgagcaacagagtgaggctctgtctcaaaaaaaaaaaaaaaagaatgaacaatttcctctttggtcttgtctgcataaaaaaggaacctctcctgctcagctatgcaggcacctggagacatttgaagctggaggtaggaaaaaaaaaaggtgaaggtgagcttgacctagaagggcaactgtgaacaaggtgctttgaggaagcaatgtcaaacctgtgtggacctttttgtaaacaggttaatttcctaaattcttttgtgggaatataagacatccgtgtttctaaaacgggagaggagaggaaacaaaaaccaaaaccaaaaccaccaccatgcactgaaggcctgcagtgggggcacaggaggaagtatgagaggttccatgcctgagttgtgatgtttgcagagaattagccagtgagagtgcccaaggaacacgggagcacaaatctgagaaggaacactcgaacgaggaccaattctattattattattctgctctgtaaggcataggtgacaccacccctctctctgtgcttaaaggacagccattccattaactacccaccttgaatggattccagagaaagactttgttccccaagaaatattagcaaaagccttcaagccagggctaagagccttagtgacaagtgagaaggcacagaacaactgagcagagatcatctcttgaaaacctatgctaattatcctgtttctaccatcaggaaagtgggaggggggaagggctgctgtgctatcacttggggtccattctggggtcaaatttgaatcccagcttctagagctgaattcaatgtggagtttgttgtccatgccaaaattcaaaggctgatcaagttgaagaacgtgacatggacataatgtgaagtacatgaaaactcacatacaaagtacctgccctcctggaaccagtccccagttatcacagagccgagaggaaaccagtcccctattatcaaatcctcttactcttgactagagtgatggaatttgggaagaatgcagcagacttctaaagactgctcagctacaagcaggatcttcatctccttttcagctgtggataacaacggaagcagtcagccgtctaataaatcaagtttaattttaacagcatgaagtattgcccgctttgtaattatacttccaaaggtaaaacccaactcgaattaacttaaaaaaattgttattgaggtaaaattcacataacataaaattaatcattttaaagtttacaattcagaggcagttaatacatctacaatgcgtgcagccctcagatctaattccaaaacgctttcatcatcccccaaaggagacccctccccctcattaagcagtcaaagtgaactttttccacaatggcattctttgtgatatatcatgctttctccacagtatcagtttattcactttcaacagcatctttgcattttaaaggtaagggaaaactcaaaggaccatgagaactaacactcacaaatgtgctttccagtctaccacgtgactgtatacacatctggtgagacagttatctcaggcaaaatgtactgtgtgtcttccctgggaggagaaacaggagctgattctaatggaatgtttactatgtgacagatactgagtcagaaacagcacagcagctaagactgggtgctctgcaaccacactgcccaagttccagttccaattcagtgtgaactctgtgttctttgggcaagtcatcataatctctctgcctcctttctcttcacacgtattgtgatggcaacaccaccacttgcctcatggagatgctatgaaggttaagtaagttcaagtgcttagaacagtgcctagtgcataataagagctcaatcactgctgccttattcgactttcactacgactctgagggaggttctatttgtgcccccatttcattactgaggaacttaaattttacagcatctaagagacttaccccaaacccccagagaataagtgggatagctgggatttgaactcaattctgagttctgttggcttagcaaccattctgtaaaatgtaccaaggaacaaaacctttctgatcccagttaccaaactcatgttgagcaaaatcacactcacacaggaaaaaaaaaaaaaaacacatgaaactgtcaccaaaatggcaataacccaactgtgctacagttttatttcctgctggcttctcagttctctaagccttgaggatccacgcgccttagaccattattacctcctcccccatatgcagtaagttcctgactcttctgatctttcctgttcttactgggcaccatcccccaagaccttctgctatttgtactttctgatttcaggctctttattctctgatacacactgttgccagaataatcttcaaaaagattgactgcaactttcaactttaattcaatcatacaaatatttcttgagcatctaggtgcaaggcaccatgatgaagataatgtgagtaagacagtccttgccttcaggagctcaatccaaaaagggaggtgtaagatagaatttcataagacaatgcagagccagagaaaggccctaagagaggcatgatgttctacaggggtattcaaaggacagagttatatcctcctcagattagagaaagattaatgaaggaaattaagtttaaaaatgtagagcatttccacatggagtaacagaagggcaggcattctgggcagaacactgcaggaagaaatggcagacaggaagcctgagtgtttggcaagggccagaggtgcagaaagaaaagcagtagggaaggggcttggagaagctgatttggaccacagtataaaaggtcttgactctcaggcaagggggttagtactgagtgtggctgatgaaatctccatagctttgctctcctgtgtgctttgctcagggttggttctcaccatctccccatcactcaaggcctagttcaagtctcagcttcttcctgacgtgtgtcttgaccgccccagtgtaaaataagatcctcttctattaacaacgaccatctctacaatttatttggcaattaatcacgtagtgcttctaacatctgttatcagtcttaaatgatttttcctttttcttattatttatcatgcgtatttatgttttgactccccagtgaagtattcactgaactctagtgtgggggaggagtcttccccaactctggaagatcaccagaaaatacgcagcctaaaaacagattttgtcaggtgactctgatgaccagttgggtatgcaatccactacacccatggaatctggcacagggccttgctatacatcgaaaaatttgctatttttacaggtatctgtgattttcacttcatatctcaacaacaaacaggtgcatcaatgtgcgcggccactaggagtacatgagagtacctgcttttcaacaacctcacttctacttagaactgataaacttttttgtaaatataacgggtgtgaagtaatatgtgtattttaatttgcatttccctgttagtgaggctgcaaaactttgcagacttttcagattttctcagctaaaactacctgttctcatctttcacccatttttctattgaactgcttgtgtctattatagatttctacaagttcttcatgcattctagatactaatccagttatgttataaatatcttctctcagtctgtcacttttttctcactttatggtttcctataaaacacagactttttaagtcttaatatagataaatatattatcatttactttttgagttgtactttttgtactatttcttataaacccttccctactcagggaacattaaaatgttctattttcttacagttttaaagtcttgtttttcctggctttaacttatctgaaagttacaatcttattttattttgttcccatatgccagctaagcccattggtcccaaaccatttactgaataattggttagttccccacggatatcacatagttctgcccccattacactgacgtctctattttgcatcaataccaccaggtcttaattactctaactttacaagtcttatctcatttgtataaagcctatcttccttgtttcttactcaattttcttgctattcttggacctttattctaccacacaaatcagtctgctggttccacaaaaaaatcctgttaaagttttgattgaaatgatatagcaatgagagagtaaggggatctttataatgcagagtactttttccattaacatcggcgcatcatctctccatttatctacgtcttttttttaggtcttttaatattttattatgtctttttttaaaaaaaaaaataaagaatttgcatatcatttgttgtacttactgctaggaatcttataaactataagtttctgtagccactgtgaacagcatttttttttttaagagacagagtctcactatgtcattcaggtgggactccaactcctgggcctaagtgatcttcctgcctcagtctcctgagtagctgcaactacaaggtcatcccactgcacccggctcagtatttttaatatattacattttctactttgttggtggtggtccataggaatactaccaattttttaaaaatctttaaactgtaaaatttttctatattttcatttgctccactaattaagtgtctacatttttaatataaatatatcacctacaaatcagttttgtctcttcctttccattcctgtgtcatatgtgtgtgtgtgtgtgtgtgtgtgtgtgtgtgtacatatatattatagtttgacaaagtcatgctctgttacccagactggagtgcagaggtatgatcatagctcactataacttgaacccctgggctcaagcaatcctcccacctcagcctcccaagtagtgggactacaggcgcatgccaccatggccggctaatatttttattttttgtagaaatgaggtctttctatgttacccaggttggtcttgaaattttggcctcaagtgatcctccctctttggcctcccaaagcactgagattataggagtgagtcacctcacctggccatatatttatatacttttctataaacacacatatatagggtctttgtccaattgtgtcatatagaaatctgagtgaagagtctaatattagtgatgacagtaggcaaccttattttgctctttattttcagtgaaggactgacagtttcaccattaaatatgatgcataggggctacatgagtagctcacgcctaaagtcccagaactttgggaggctgaggcaagaggatcacttgagtccaggagttaaagaccaccctgggtaacatggtgaaacaccatctcaaaaaaaaaaaaaaaaaaaaaaacccaaaaattatccaggcgtgatggcgtgcacctgtagtcccaactactcagaagactgaagcgggagcatcactggagcccaggaggttgaggctgcagtgagccatgactgcaccactgcactccagcctgggtgacacagtgagactctgtctcaaaaaaaaaaaaaaaaaaaccatatatatatatatatatatatatatatatatatgtcacttaatagtttttgggagttattcttttttgcattaagcacatgtcctgtcattcctagtcttctataagtcatcgttacaaagaacactgcatttcacccactgaattttatgcaactatgaaaacaaatgcacttgtttctcagtgagttatattacgtagcaaactgcattttcaaagacggccaagacagtatctcccacctcacataatctttaatgtgaccttgtaactccccatcaaaagatggggtcttccagagcccaaggtgggagaatcgcttgaacccgggaggtggagtttgcagtgagccgagatcctgccactgcacgccagcctgcgcaacagagtgagaacctgtcactaaataaataaataaacaaataaatatcgggtctataactgggtgcagtggctcatgcctataatcccagcactttgggaggttgagacaagaggatcacttgaacccagaaattcgaggccagcctgggcaacagagagagccctcatttctacaaaaaataaaaatattagccaggcatggcatcatgcacctgcagtcccagctactcgggaggctgaggtgggaggactgcttaagcctgggaggtcgaggctgcagtgagccgtgatgtaccactgcactccagcctaaacgacatctaaaccctatccaaaaagaaaaaaaaaaagcctactttcccttcccttgaatgtgaattggacttagtgactgctttgtaaacaatacaacacagtgtaagtgatgctgtgtaaatttattttattttattttatttttttgagacagagtcttgctctgtcgccaggctggagtgcagtggcatgatctcggctcactgcaacctccacctcaaccttcaggttcaagtgattcttctgcctcagcctcccgagtagctggggctacaggcgtgcgccaccacacagcaaatttttgtacttttagtagagacgaggtttcaccatgttggccaggatggtctcaatctcttgacctcgtgatccacctgcctcgacctcccaaagtgctgggattacaggagtgagccgctgcgcccggccaacgctgtgtaacttctaaggctaggtcagaaatggccacagaacgcagccaaccatcatgctgtgggaagcccaagccaaatgcagtggccaagtataggtacgccaggtttccatcccagtcgagctcagcctcagagtcaccatcacagccaggtggcagaaatgtgagtaaagaagatcacagctgtttatgtcacacacagccatttgtgtcttcccagctgaggccccagaaatcacggcacaaagataagacacccttactgccccattcaaaattcctgaaccatggaatccataaacagaacaaaaaggttggatgggttgatatggtatgtcatgcaacggtggacagctggaacacaagactagagtctctcatggtaactatctttgcattcccgggataactcctacttgctcaccatgtagtactttttatacattgctgggttcagttcggtaatattccacttaagacgtttatgttttgcttggtgaagggagagattggcctacaaaaaatgtttccttcttagatcgtatttatatggttttgagatcaaggttaaacttagccttttaaaaaaagttgtgaagcttgccttcttttcctagcctctgagaaatagcttaaagatttgttaattaaatatcaggtatattcacctgtaaaactgcctggggggcgctggtgctgggaaaggggtattcaaaccaatgatccagtttctttcgcttttttttgagatggagtctcgctctgtttcccaggctggagtgcagtggcgcgatctcagctcactgcaacctctgcctcccgggttcaagtgattcttctgcctcagcctccctggtagctgggactacaggcgcgcaccaccacacccagctaatttttgtatttttagtagagacggggtttcaccatgttggcctggctggttgcaaattcctgaccccgtgatctgcccatctcggcctcccaaagtgctgggattacaggcatgagccaccgcgcccggccaatgatccagtctctttaataattattagcatatttggaatctctattcttgagtcaattttaagaattttgttgtctcttttgaaatttcctatcataaaacttttcacagtagcccttacatgtgtgggtttgtgtatttaaaattctctcctgcactggctctttgtttctaatactgtttacttgtccttcttttttacaagatcagccttgctgtattatattcatattttctttttttttttttttcctgcttctcgggttcaagtgattctcctgtctcagcctcctgaatagctgggattataggcgcccaccaccacacccagctaatttttgtatttttagtagaggcagggtttcaccatgctggccaggctagtctcaaactcctgacctcaagtgatcctctggccttggcctcccaaagtgctgggattacgagcgtgagccacagcccccagcctatattgctattttcacataatcagcttttgatttaatgtggatcatctcattttttcctcccatttcattaatatctgctattacctttatgtttccttgttaaaaattgctttcttttgtggttattctttttctatttttcttaataaaatcttagctttttttttttttttttttttttgagatgggagtctcactctgtcaccaggctggagtgcagtggtgccatctcggctcactgcaacctccatctcgcgggtttaagtgattctcctgccttagccacctgagtagctgggattacaggcacgcgtcaccacgtccagctaattttcgtatttttagtagagacggggtttcaccatgttggccaggatggtctccatctcttgacttcgtgatccgcccgcctcggcctcccagtgtgctgggattataggcctgagccgctgcacccagcttttttttaaaaaaaatagaggccgggtgcggtggctcacgcttgtaatcccagcactttcagaggctgaggtgggtgaatcacaaggtcaggagattgagaccacggtgaaaccccgtctctattaaaaatataaaaaattagccaggcgtggtggcgggcgcctgtagtcccaggtactcggagaggctgaggcaggagaatggcatgaacccaggaggcggagcttgcagtgagccgagatcgcaccactacactcctgcctcggcgacatagtgagactctgtctcaaaaaaaaaacaaacaaacaaaaaaaagagatggagtctcactatgttcagactggtctcaaactcctggcctcaaatgatcctcttgcctcagcctcccaaagtgctgagactacaggttcgtgagcctggccaaaatcttagcttttaaatttcaaatcaccctacgtttttaaaagcagagtgtcccacagattctaatctgagattactctcccacagtaattgttgactaaactacttcctgattaacagtgagacagagaagaagagtccttgggcaatcaaaaaccatagtaaaatcacagcagggtcgacaacccatacagctccttacaagggtgggctaggtggcagcagactggtgccaaccgtgtcagggcgaggtggaaggctgctctgggtgaggtgatatggaggacccagagcacagtcctgaaagcttggctcctcaccccaccctccttgagaatgacaattagccctagacagtcaccaaaatattgccaaagctggagagatgaagcccctggtccctgtgccacttctctgactctggataaaccaactgactatatgtcggttttctgagtttgctttttggggcgtgggggagggtgagggagtggcagaggtgttgtttgaagtatcataaagttttcgaagaaaaaggagactgcaggctaagttaaaacactgaaagaatagtaagtgatggtcaagagtgagaagggagcatggctctgctggtagcggtatgccaatataatctctcaggaggatgcaaggcactggctaccaaaggccttaaaaatgcacacactacttgaaataaatatttctaggaatgaatcttaaggaaataactgcccccagataagacaaagtcactcattaagaaatttttttgcagcagtaaccacccccgaaaaataccccagaaactgaaaataaatgatcaaaactagaagttggttaataacatgatatcttttaaaaatgcaaccatcaaaaatgactccatagatacatgcgttaagcaaaagatcaatacagataagttttaaatagtcataaaataaaaataaaattaaaaattaggttatagaactgaatgaggccatttctgtttaaaatatttattgatatatgcctagaaacagtcggaagaatatgggccaaaacgttaattagtggccatctcttagtgatggaattactgatttttctttttattttcgagacggagtctcactctgttgccaggctggagtgcagtggtgcgatctcggctcactgcaacctccaacttcctggttcaagcgattctcctgcctcattttcctgagtagctgggactacatgcacacgccaccacgcccagctaatttttgtatttttagtagagagagtttcaccatgttggccaggatggtcttgatctcctgacctcatgatctacccgcctcagcctcccaaagtgctgggattacaggtgtgagccaccgcagccggcctgattttaattttctactgtaaatttttctgtgttttcaagggggaaaaaaattactaaaaacagaccccttccctttccccctaacaactacaaagccaaacttaaatgtactatgatttttaactgcagcagtaggattctgagtgagtcaatccaccagattaatatttttttaaatcgagacagggtctcactctgtttcccaggctggagcgcagtggtgtgatcccggatcactacggcctcaacctcctgggttcaaatgactacaggtgtgtggcactacacctggctaatttttttatttttatttttttgtagagacagggtctcacgatgttgcccagactggtctcgaactcctgggctcaaccgatcctccctccttggcctccagaagtgctaagattataggcatgatgctgtccccagtcagattaatattttcaagagaagaaagcagtaatgcaacttttttactttttaaggtgcatttttaggaataaaggggcaacaggtccgcaacttactctcaaatggttcatgtggggggaaaaccacacacgcacacacacaaaaggagggttaaataatgtgataagatgttaatatttggagaatctgggtaaagaatatatgggaatgctttatactcttcttgcaaattctttaagtttgaaattattttaaaccaaatggttttttaaaaaattatgcatagaataacccaaactttctgaaagtcaagggttacacacaaaataaatttgtgtgtatctgtatgtgtttttgggagagggagaatagttcagaataattagaacacgttgagaatttagaattctcttccatttagtccagtgaggatcttaaaaaacctaagaagtactacgtacatatataattttagaccgcattttcagcccaggcaagagtcagagctcatacaactttgtggagggtgaaaagaaccctgccacaaatgtgctacagagcccgcatcatctccacaacaaaacacccgacacccgaggttcaaaaatctacttcatcaaagatcaagaataactctggttagaactgttaaatcagtggaaagttaatgaacatggaggatgaagtccagaaagtgctgtctgcagtgtttggggcaggcattcgcattaggaaaccctctgtggtacaggctctctcagtggccaactatttggtgatctgcacatttttagcatagaaccttgaaatgatacagctgtgctggtcattacggaattctctttttgtgtgacagaattgtgacaggctcccaggacctaaacccagaaggaagcaggaccatattgctgcctagagaaggggatggagcagattccaggacaccgatgaaacagaagcttccatcacagtgctttctgctaccttatgagacagttcgcatctcaacagctctaggatacaaaggaagcacatacatttatactttataaggtggccaaggaatcctactgtgaacaaagaatgtctaagataataaaattccactttttttttctataaaaagcaaatcttgtcccagatgcaagcacttgcaacagaagctctgtgggggaagcctacctctcaaggccctagttcttggctcatccccaccccatgacctggacaagacctgtgagggtgccatttttagtatcaccgtgcctcagtttctccacctgtgcatgtggaatgatactggcagcccccgtagacttatggggatgactgctgagctgatgtctataaaatgttcttaatggcaagggcgaaagagctataaatacaaggtcaaagcagcatttaaaacctttttaaagctgcagccacttctttcttttgaaacagagaaccacagggaggatcaaaggcgtgctgctgttaactgcggctctcaaggccttgccctccacctggcagaaaccctagagaggtctaccatgatttttaccttgactaacaaaatctcaagacaagttgtacaatggtttcctggaacattctgagtaaagaaatgggaaaccaatacagcttacctagcttgttaccttctatgaacgctggcattaaaagtaaaaggcagccttgggaggaagaaatgcaaacacagagggagaacatagcttccccttgtctctctctgccacaaaagcctggccaaagtgactctactaggttgaagcagcctgcataataaaacgcttaaccttggctaagttaacctcctcagccattaaaaaaagggagggtgggggaagggctagcaaaatcaagcttacgggaaataaacctaatcaaagccgagtagtaacaaagggcaccagaaacatttctactgtatcacatcccacaggctggccaagagcccggaattttcattacaactttcaaagagagcaagaggaggagggaaaaagatttcacaaaagcattatcaaggccccaacccaggatgccctgctgtacaaccaaaatttgtaagaggtcagcctttcagggagtcaaaaacccagcatgtggaaactggcaggccttttatatagtgggaggggttcttaaaacgactactgtttcgcactgaagtctctgagcttcacagatcattaaaggtttctgaaccacagagaaaggagggcagagttaaggaaataaatcaaaagttcctctgggacgcacaaatgcctacttggaacaggctttcagcatgaatatcctccacattaaacaacagggaggacttttcaaaataaaagcagaaaagagattcattttgttacaagcaatgcactttttccttttggtgtaaaggttatgtgtgctataaaaaatgactcctgccgtgagtgctgcggggaggtggaggctgggcttggggcaggaggtggtggtggtcaaagaaaacaagtagaagtgaatacaacgcctgagaatgctgtgtttgggggtcccccaaacaagtctaaatgtcccgcaatgatttgggggtaggatgtgaggtaggagaatggtatcagaaaggaatttcttctacatttattccttgccatccttgcccaagaactgaaatcatttccccacagccagaaagaactgtcttctttgtgggtgtgcaacacacacagttgcagatctggggaaaagagactgtgccgttttgaaggcagagcctcacacttcttaaggaaatatcagttgtctcaaaaccagcagagggagtacaacgtttgagaagaggaatggccaacccgattgctgaggattcatgtttagccccgacaatggttgtaaagctgagctatctaccataacttctgcccttgctctcctgtcacccagcaatagtaaacagaaagaaaagctatactacctactcagatggaattagcttgttctaacaaccgcatgaggcagcagagagaaaaggagaactgtccacacttctgtcgggacacagttcctgtgagcagcactgttttggggagaggaatagaagcagggggaaggctcaatgaaaagcagaaagtccaatttggactgacagcaaatcccaaagcaatgattttaccttaaaatccagggctcctaggccagtctgtgaacagctcatttccagaatttttgtttatgagagggcaaaatggagaactctgtctttcaagcttttctttcaacagatgatttgaaacaaaagcagcacactcatgaaggcgtatgtctgctaaatggttgctatcttaatctttagccacagtttatcaaaacatgtaggaatgggttgagaaattaactggtgctaagattatcagcatggacaagttcctggggagggcctggcgacatgatcaaagctaatggtccctctcccaggagcaaagagcctactatttcatgcatgatgatgttgggctctggcactggaaatctttgctcaggtccattctaagtgtcgaaatggtgtaattaatggttagcctgggtatgcactattcaatcaggcaattttttttttttttttttttttttttttactaaatccgaacattaatgctttctcattgtgggaaatgagagctgggataaagacatgctcaactcaacagaacaaacacaacctatatgtgactttatgttagtctaggaactgtgcactgatgcacacccaggaggcactaagttaacacacatgcatgcatacctgcctgcctgctgggtaaggagggctgggcaggggaggggggccgccctggctgggggacacggctggggccattgttgccactttctcctctttgtagacatcaatttttacaaagggccgaatgataaaggtccacaagacctcacccagaacggctgttgcaggaagcagaggcctgagcagcctatagccagaagcccaggcagggggtgtgccaactacacaggcccacatgaagagcctccatgaggaagacgttatggcaagaatcctctaagtctccaagggacgagatcagaacaatgtatggaaggtgaagtgatacagatttcagcttaataaaaggaaggcggcccgaaaaatggaactgttcaaaaccacaatggcttcatttaatgggttcgatgtccccagtctgcaggaatgctgtagaagattcaggtagtgagaaatacctcaacagacaagaaagctacttcaaggacttccttcggcaaggcctttcaaacaagttttaacattgaaaacacccatccttcaaagagcttgaagccccaagtgtccatcttccaggatgcacaagactccccaagccttcatcctcccattactatttaatatccacactacattgttcggcacttggtttccctccagtatgcaccgtggcagccagtaagacacccccagggagcacaaccgcagctcactatttttctccccatgctcaataagttcagtaagtgcttgatgattgactagcatcaggaataaactaggagcattttacattcacactatctagttaaacattccaaatgacagatttccagaaaaatgttgcaacaaatgtaagtatttatagacatgcctggtaaggtatgtagcatttggagaaataataactagaacagagtactgtacaaaagaaaatggtacacttttgtatgagtctaagatatattggacaaatgggtattcctattggtaaacatggacatcttaataaaaatacaaaattactacataaagaagcattacatccttcaactcatctggtggccataaaatggagagaggcacatggacttttctcctgagtcacctgatagatttacaagatcaaaagaaataagggcttcaagtctttttttttttttttttaaagagatggggtcttgctagcttgctcgggctgaactaaagatatcctcctgcctcagcctcccaggtagttggaactatagtaggagtatctaccctgccctgctagaacttcaagttttgatgggcaaatccaccccagaggacaggacaaatgccagtattctggttaatagccccagatgagccagcttcccacccatctcccgtaaggtggcagacacataagggaagccaccttggacctttcaggtcaacccatctaccaggtgatactacagagtgagctttggatacatgacatggaaacaaatggccagctgagtcccacctaaattcctgatctacaaaattattaaaactataatatttatagttttaagccagtaaattacatatactaaaaggttttggtttttagaaatttatttaaaagttttagggtttttctttttaggctcacattatccaaaacgtgtagtttgcccccagttcactggctctgtgctttactttgcgaaactagccatctatacagattcatcgggcctatttcctttagaacttaatcctattgttccacaaattacagattctcgccaaatgaaaacacctccctcgacaacttaaggccacaaacctctgacataattcaatgtgtgtcattagcacatttccaaaacagagcacttgtgggaagaagaaccaagttctgatcttagaagccctgtgcctaagtcaataaccaccaaatcccaaaggtgctggacagatgctgctccggccccgaaaataatcaaacacacaaaagttactattaatatttcttgccaaacaacaatcaaaaaaatccaactcctgcacatgggaacaaagcgacaatggcagcagctgcaaatacataagcgaagcatcactgaagaaagtctccagcttaatattgctcccgacaccctctgtggtggttcactcatacagcaaagacacgggataaaaaattccacagactgttttcaagataataaaatggcatatgatgatgactcactaacagactaaaaggaaaaaatatccgtcaacagtcataggaagcttacaaagctgcagagatctggcaccactaaagctcctccacctcccctggctctcacctccagtacacacatgtatgtgggacatacaaagtgtgtgtgttcatgtgcacaccctttagggattaatttgaagccaagttgcaattggctaatggcttactctactgcttaagacagtattttattcttgactggctcaataaacctgctgagaaaaataaacaatggatttcaatcttataaataatctagaacacagaaccgctgcgcaaacaggagagttgatttactgcgcacaataaacagaacaggaaggaccagtgtggcagagtgaaccccaagtcctagacccattgtcctgggacagtagagttcacaggggttttctgtctattacacaaagtctaaggcctgggatatccaggtttcaaactggtcttaaaaagagcatttcaaagcagatcaggtggagaagctttggtggtgccagatctccgaagctttgtaagcttcctatgactgttgatggatttttttttcctttggtctgttagattttgctcacactgaagagcaaaagatgaggaaaatgttcgtttaaaaacaatgaagagttttcacgtcttaggaccattaattatctacccatgattacaatgtatttcgaacctattatttatacatgcgtgaacacacacacacatacttcattttaagcaaataaaaagtaagggctgttacaggactctaagggtgccataaagaggtattaaaatgaggtccctgcccagaaggctttatattctatataaatacatatatgcattcatgcacacatgtgtgcagagtaaaaatgcatggaaaagaggaatcagagtcaagtccaagaataaaataaaataaattttaattttgttttttgttgttgttgttgtttttgagactactctgttgcccaggctggagcatagcagcgtgatcttggctcactgcagcctcgacctcctgggctcaagtgatcctcccacctcagcctcccgagtagctgtaactacaggtgcgtgtcaccatacccagctaattttttgtattttttgtagagatggggtttcaccatgttgcctaggctagacttgaactcctgggctcaagtgatcctcccacctcaacctcccaaagtgctgggattacagacatgagccactgtacctgcccaatcttaatttgaagagggtggaacaaaacccaactctgctgagatgaaatgggccctttgtgtaacagcaaccagcctggggaggagcagaggcagccccagcaagaccgttagaaatgagggaactttagcagggcaccatggctcatgcctgtgatcccagcactttgggaggccaaggtgggtgtatcatctgaggtcgggagttcaagaccagcctggccaacacagtgaaacctcatctctactaaaaatacaaaattagccaggcatggtggcgcatgcctataatcccagccattcgggaggaagagggaggagaattgcttgaacccgggagacggaggctgtggtgagctgagattgtgccattgcactccagcctgggcaacaagagtgaaactccatctcaaaaaaaaaaaaaaaaaagaaatgaggggactcagatacctttcagagaagacccctggcccacctggccccttcactaggggccatgaaggtaagcacccttattcacctcagacatcccatcctagacagcacaggcctggggttaccaaaagctcccccaaaatcccaactttgtcaactgggatagtttagatatttcaatagtcggccgggcgtggtggctcacacctgtaatcccagcactttgggaggcagaggcgggcgaatcatgaggtcaagagatcaagagcatgctggccaacatggtgaaaccccatctctactaaaactctactaaaaatacaaaactcagctgggcatggtggcgcatgcctgtagtcctagctacttgggaggctgaggcaggagaatcacttgaacccgggaggtggaggttgcggtgagctgagatcgcgccactgcactccagcctgggcaacagagggagattccgtctctaaataaataaataacatttcaatagtcaaatcctggggattatgataccacaattgagaggattcagaagaaggatttaagacacttgagcagaacaaagaattatatttccaaagtgggggggtcggtggggggaagaaacatgggccattaatactgaaacttaattaaaaaattcaacatctcggaaaacttagcttaatggaattctggtatcccaaaggaaggttgctcctgtttgcttttcctatttacctaacacaattaatggttttcaaattatacatgacaggaaaaaaaaaatcttactgggagtagggggatgcctttcccatgctgagcagctgggactgagactgaggttaatgctttgctttacttttcaaaacaatactattaatttttactctattttcctaagtattactcaagggtatagtttcaaataagattaaaaatgaactagttattcaaggattataatttcagatacattttgaaacttagttttaatgtcggtttcctaacagactagatagatatatttttaaaatatcagcaaactagttttcaaagtcagaatagatcttacaaggctaaaaaagaatctatgatataaaatataagctccaagtggataaatccattgactgttaaccacagcaaccacaacttgtaagtctttctaaagaccaattcaaaccttccatttgttttactagctaataaaatggtgcagactatttaggcttcaaagtcataaatgtctccatctaaaagtcatccaggtaaccaagacacagccaaatcataagaaatataggttagcaaataccaacagcaaataaatccctgcaagcaacattttgttcaataacactttaaaagccccaagcatacttcatttgagtgcagtttctataagtaatacatttcaaataattaaagcattctcatgccatccccactagttttcatatgtaggataacgccaaggtcaggctgtttacactgagaacggcaactgtccaaggcccttggtttaaaaagtcacccaattttttaatacctccttttctttccaacaccagcaccaaaagtctcttacgtacttcacttacacaagggaatatcagccagtctctcatagattaccctcacgaaaactggaccactgcccaggcaaatatccctatagttcagactatcacaattaatagattcgagcctcggctccattttaatgggaacaaactctcagcacaggaatagctataggatcacagtacttactgccaaaatgcagtgcctgtttctactggcaatcactttggcctcaaatggaaaattccaactgtttatatctatgtgagcacaaattattaagaaaaacagtatggcacataaatgtctttcctcttacccatcttgccagcccctcaaataacttatatttctttttcatacataaggaatgccaataaaagaaagcaatgcccgaaaacactgtggtattaaacctttatgactatgtaaacttcagttaacaagagaaggccatccttccacataaaaaggcttattaaaaactgaaatagaatctggcaaggtctaactagactgcatgccacaaggtaaagagaacaagagcttttgtatcaagtaagacaggagttacaatcatgtttctagaaaaacatgggagtgggaattgagaagaaaactatattgagaagtcctggctcacggtcaggcgcggtggctcacacctgtaatcccagcactttgggaggccaaggcgggcggatcacaaggtcaggagatcgagaccatcctggttaacatggtgaaaaccccgtctctactaaaaacacaaaaaattagccaggcgtggtggcgggcgcctgtagtcccagctactcgggaggctgaggcaggagaatggcgtgaacctgggaggcggagcttgcagtgagccgagactgcataactgcactccagcctgggcgacagagcgagactccatctccaaaaaaaaaaaaaaaagaaaagaaaagaaaagaaaagaaatcctattattgacaatggaaataagccctgatacttttctgtttgaaatattttgcaataattagaaaaacaaaatcaagccctaatagtgaaactttacaattttaacagaataaagacagtatcattttaagaatgatatactatgcaggctcagaattctgcaagtctgcattactgtaaatagcggtgcttcctaaactttacagtactttggaatcctctggggggtccgttaaaatgcagattctggctcaagagacaaggacagggcctgagaatcttccattttaaccagtgatgagagtgctggcctgaggagcacactgtgagcagtgaggatagacaacgtttgtagaagagggacaaggtttaaaaacagagatcttctaatgtactggtatgtggccgtgacacatttgcacattctcagtagcatcaaccgactaaggaagtccatactttgttatgcaacattagattaagcattaatgaggctaggaaaattgtttatttaaggttataacctgaaattaaataaaacttcaggctggaagctcatattgaatactagaatcatttttaacctcttaatattaacagaaacctgattactcagtcttaaagccctttctcaatagcatttattctctgctgcaggaatatggtctatgcaaatgacattttgcctgaagaaaaaagtacagttaatggccagtagttacgtacgtatttaatagaattcattcccagaaatgtggctaagaaaggtggttgattttcatgttatttattaaattaaaaatttaaatctctaatacctttcatcccattacttaaagttaaaaacgtcaaaactggctgccctttcactgggcccttggtgccaaacagtgacacatttccaatagagaaaatgaagatagaaggcaggcttcccttcccattaactttgaactttcaagtccctatctgtcttcctacaagactaaattataagaagagcctcctctttggtcccatcctatacatacttcggtagcacagccctcacttctcttcttaaaagccttaaatgggtcccatccccacactcacccatacacattctttggagggaattcaaggtcccccaaaatctaccctgcagctataatttgggcccaagttctactgcatccgcttatgcaacctcctttccaaccatgctcatgtacttgctgggcacgttttacaatttcctgtctccgtgcctttgttcatagtatttcctatggctggaaagttgcttttcctctaccctcccaacctgggcctgtcaaaaatgaatccttccttcaaagcccagttcaaacaccgcccctccaattagctttccaggagcctctgtgctcactttgtggggcctgaacctccacccaccagggccctcagcacattctaccaagtatggcaggtatgtaaatgtcgtgctggctccctgcagggcagggatggcaccttgcttctctttatagataccctacccattgcagtgctcagtgggcacccagaactttaaaaaattgaactatacacaaaatttagttctgataatgggaagtgaatgaaaatgagtttccagtgtagtaagtgtcaatgcaccaccaactgggattacaaatgacacaagcttaatcttcactgggctaggtgctcaaaaataaaaagaaagagacgagaaagacagccaaagcatgtcccctttcaccttccatctccctccaggggctaacactttgggaacacctcttggctaccaagctggggtagatcacattgtcttctcaccaatcttagttgcaccagagacaagcaacggcaggtcactgaggaagcgctcctggactacgacccagtgccagctgaatttgtctaagtaataggagacacagctataaacaaaggccaggattcaagggacaatcatccaggtgccagacacaaaaagtctttggttcaaataactgatatgtcctcagagaagagatatgtcaccactgcttgaataattatctcatgattttgaagaaaactgcaatgtatagacaaatcaaacaaaaaattatttttggatcatccacgattttgtgttattcctaacatggattcacctttaggtaattaagattctctattaggcctcctactttttcaggcattaccttaacatcaaagctcatgtaccatccatctacccaacaataagtggcagggctcaaagcagaatcaagaggcctagttctccactgtcctcccaaaagttcagacaccgggcgctctgtgacttatacaaatatactaacacttaagactctgatgtggtttatgacaaacagtggcttgacagagaagaggtatacagccaaggtgaatctaaaatgctccacccgtattcctgactacatttcacctactaattatatactttataagcatattgaggggaggtaaatggttatagagaaacagagaatgggaaaaagtataataaactacaggatatttgcacaaccatgacactaaaagatttgacttgtagttattctcttgggtaccctgaggttaacacgtaatacccattcaactaagcctctataaacagttgggttttccgcaatcacagccactattcccacttcagtgggcagcagtgttcagagaaaagccagatttagctcttgtgcaataaacaccagaaaccaaaagagctaggaaagctgtttacgtctatgcccaccaggaacccttctctgctataaccgcatgaatgaactggtaagaatgaggtctcaacaaagcttcaagacggacgttgttaactagttgctgccctccaagtttttggcaagacagattaatgaaaaacaggtaacttatttttatacaggctcagtatatttacaagcagaaaggaattctgtacttttcaaagcatttagctaccaccttatgtagtatttaaggtagacaggaagaacaatcatttccaagtatttctatgcactctttacaaacattatctcatttaaattctcaaaataatcaaaagggtaggaattatcaccccattttacaaacgcagaaattaaaggacagaggggatgaataatctgcctaaggttccagagcaagtaagtagcagagaaggcaagaatcatcacttcgttctcaggcactgcagcaagtaacgacgtacaggcattttataacgaccacagcacctacacaattctcatgcagagaaacaccattttacagaaaataacttcccagtgttgtcaagatttgacctgagctttccaatgaacagctcaaggcagactgcacaattaaaaagagatcatcaagtactatagttaccagtaaggccaagaatagaacacaggtctgctgacccttgcaccaatgcccaatcaggcatgttcttttggatgctgacacccttctcaagttccaagtcacttgcgaataacaaagaaatgagttaataattctggtagacagaagaaaatgtaagccaggcatggtagcgtgcacctgtaatcccagctattcaggggaggatcacttgagcccaggagtttgagaccagccagggcaacagagttagatcttgtctcattaaaaaagagagagagagaaagagagagagaatgtgaaaagtatctatattagagggatttgctatcaaaaggggcatgactataagaattctacccagcaagttctgaatcaacaacactggtacatgcaaatctcatcttctgcagcaaaaagtaaaaaatgacctctgccctcccctccctgtgggctgtgaatgattagcttggctatgttgataactagagaaaataagaaaacacaagatgagtgcctctcccagctcattataatacttacagatttaccctactaccaaactcctccagtgcaatgcaaaagacagcaaggacactatgaatatttagcaaatgtcaggcataataaatcctccattgctgcaaacaactctctcattagttccaatgatggtgactgatgaagactttggaaataggaaaactgctgggtgctagagaagggagaagagctacagcgtgggaaactgtgaaggcggaggagtgatggggaaaggtctcagcaaagaggctagtggaaaagacaaccagagaactagctcaaaaggttggtgtactgagaatgcctctgaaggagaaaaaaggctatttatttacggagtcacacatcatcaataagaagggaaaatcaagagcaaaaagaaaaacatagtagaagaacttaactaggttaaaggttactcacatctgcttccactacggagataaaacactaagtaaaattaccgagcatttccaaatgccagatggtagaatttagatttaatgcttaatcttccaattatgaatttattttttaaaactgaaagataaaataattgtcaagatagttctgtatcaaattcttcatggtttgcaacttttagcagagcagagacagagaacttgagaggctacaatctgagcgatcaggagaaatctactcactgatctcttttttactcagccaaaccaaacttcctacactcgggcaaaggcattttaatttttaatcatatcaaacttcaagtcactgaaatccccagaaaacttaaaatatgtatctcaatattccatattaaataactctaccctgttctgggaagggtaagaaataagttgattatatagattggcatcataatacatcttagtttaatgttcataaacaggtttctctctctctgttttttaccattctcaatatgatccatcctagcatatgagatgcgtaatacttaaatttaattgtcattgactgatgcaaatcatccatttatatatacaagactatacttgaaatcacaaaacccttcttccccatgagttatcactgtccttgaggtactatacagtaagtgtccagaaaaacagctcatttttaaaaagacagaattaaacaagaggaaatcagtaaacaacatccaattaaaaaattaagccaaaaaacccaaattatccgcatacttttatagtagatattcttgcatccatctcccacctccactccctaaaaaagcagctcaatgtctaggcagattaaacatggatcactcctcccaaagtcctgaagagtgtttctggttaatgagtcctcccttcgccttcagacagtggagtggctgctccaactccatcccatctgccctatcccgtggcctagccagagggaagactctctccccatctgcctctacaccaccagggaaggagatgaggagggaggcaaccacagggaaatgagaatgaatcccttccccgcattctcttcatataatttcactctgtattttcctcagcaaatccttctacctcacgtttatcgggcacatttgtcagctctgacccccagctttgtgaaatactaagtagttttttgtaaagctccatttaagcaatttataagatccccttgtacatctgtccagtggaaagtgcaaactctcagggatagaatattaaagagttaaaactcctcttcaaaacagagcaacattgaaaaatggaaaaaatcccccagaactcaaagtataataagccacaaacctctggtttggttgatgatttctgccaattaccaaattcaaactagtgataaaatgctatttcctattccagccactatgtttaaaatttgatgttaactctccaacaatccttcccccacaactaaccctctgttcccaaagacctttctgttctcagagttacaacagaagtctatgttctccaggcggataagcataatctgtcactttactatctaaaaattatgaactcaaattaaaagtcaagggagtaaaacggagagaattctggaggccagcccgagtctgagcacagcgcagggttaaaggaaaccatttcataagatcaaatgtggagaggcagcaggagcaaagaggaaaaaatcaagttacataaagtccaattgtactcactgtttccttattgggaagcagctcctttctaattctgaagaagttcttcccgtactgcctgagtcccttaacgaagcgtttctgtgataaaaagaaacaaatgggatgtaaaaaccaaaaacaaaacaggatgtcagcaaagcaaagatatctacaatcagcagaataacaaccacaaaaaaagtctcggctagggaatactgccgaggctcggagagtatgtcagcagctcagctgggacccactggccagggcaggccccagctaccttcatcagaaccccaatcccacccaccacgcagggcagcgcgtttaagagaaggacgtcctgcgtctgaggctaagaagcaatctgtccccctcttccaccaggcacacattctggtgcacgaaggtataaatatgctccatgttttaataaaacacaactgctttcccacctgagaaccaagcttcccagaagtgtcgagcagaaaggggaaacagaaccaaacccggtgactcttctccagaagggaaccctagggggttaaaaggccgctttccttaatccaaagaatttgccaggaggcaccggaaggcaccagtatcacagaagcccaccgggaacacgaaagccagcgggcctgccccaccgtccgtcattaaaagccactccgagacaccagagaataaccagcaccccttccgccctcccgacgccactcgccgcccccatccattttcgcagcagactcgtccctaaccccagcccggagactttcactttgtcccatgcctcccgagcacccctccccgccccggtgggggcagctcctggctccgagcccccacctcggggctcccagcctggtcccgggcggccgaccccagcagccacaggtaagcgcccggggtccggggcggcaagaggccgtcgcctgtcactgggctccggctccacaaagcgcagggcggaggcggccgcgggtggctcggcgtgtgaccgcggcggggccgcgcggcgcggggcccggggggcgcggggctggggccgccgctgacgggggaggaggcaggagcgcggcgcgcagagcccggcgcggccgcgggcggctgcaaaaggcggcctggattgccgccgccctcctgtccgccagccggggccccgcgccccggccccggccccgcccccggcccgacccccaccccgaggccggagcctccagggcacccggcgctggaatctgtgtcctccttccggacaggagaacatcaaggcggtaaagcacagaaacttcctccctaccgcagcaagcgtggggagagggcgcccacagggctggggcccttcccaggctgctgggtctccagcccacgttccggatggacgaagtcggctgcgccccggccgcacgccctccgccccaaccccgcctcagctgcgaaacggggggctggccccgacgccccccgcggtcccttccggcccgcgattgtgggcggcctctccctggcggcccaggcattagcctgcacttccccggccgccgcttcacaactaaatcaccgcggaagcttcccagccaataaatcacctgcccaccgggcagagggtccctcccactccctgtgtttgagacccgccaggcggattcagtgaagggccagacttagccttttaagaccagtctgcaacctcctactccagtagtggaggctttgcgtttttgaatttcacccttgctgagatatgactcatcattgtcaattttcaatataattcatacagttcgaagggaaaatctctcaaggcacaagaaagcagcaagctctcctctagtgtgaggagtgacctttgttacttgacaaaagtatcgtttatatgatcaacaggcatcctacgctgtgtgcacacagcatatcaccgggagagacggcacggaaagatggccctgccctcaaggagctgcagtctgcccaggaaggcagacaggtaaacaaaccagtcctagggcctgcaagaaaagcagcagaggaacaaagggtggtgggtgaagctaggaagaggaagcaacttactctgcttgctgatgtcttagaggaagtgacaaggaagagtgtgagcctgccaggtgggctccagcagggcttccagcagaagtcagccaggaaaaggcacagggaacattctgggaactgcaaggaggacagggtgtgcagaatggagtgccagcagataagacgaaagaggcaggcaaggatccggttgcagagagcccttcaggccgcacggaagagttcctaattgtaggctggcagaaaggctgaagctggagctttccatgaaaagactggatgaggactgtgccagtggcagtgtggcctaagtgtagattagggacagaccagttaaagaggctgctgacacagttcaggtatgagatgaggacctcaactactggcacactccacctcagtaatcagaattcctgccgcttaatccattcttcaagtattcaggtatttactgagcacctagctgagaggggtctaggaagataataaaggttgccatggacctttactgaactgtgattcatttttgcacgtaagataagtatgtgtgaagtcattacagaacattctgagatgtcatctggccaagcataaagaagtgaggtgcagctcatcagtgcagcaagggacccaagaaggctagactgcagtggtctgtagtagttcagaatgccttcgccaaggcagtgacatcagcgagatcacaaggggtgggcaactattgcaggggtgggaggtggcttggtgaccgggccctccgtgaaggtcagaggtggagaatgggaggtgggttacaggggacagtctacacagacttggggcgggcaatctggagtgagccaggctgtggaacgccaggaccatgcaatcggaacgtgggcttgataccaagtgacatctaacaggtccagtaaaagaggcctacacaataaaggcagcatgtgagaaaggctgactctggaacatcagggtaaggtggcagagttggacaaacaaattcagatcctgtttcttccatttattgtgatgcaatcctttgaacatcatccattcaaccaatagttactaagtacctactatatgccaggagcctcatatatattaattcgaaatctttacaacctaagaagaagtacaattattatccccattttacagacaaggaagctgaggcacagataggtaactagatcaactcctcagagacaaagccagaattcaaacttaagccccctcaaatcctcagagccacactctgtaaaatgcaggcaggcgtctacagtggtaactattttctgttaccattttctatgagtctgtactttcctcttctcgggtccaatgtcaaatcataaagtcctcagtattcttcctaagaagtgtctttcagccgggcgcggtggctcatgcctgtaatcctagcactttgggaggctgaggcgggcagaccacaaggccaggagatcgagaccatcctggctaacacagtgaaaccccgtctctactaaaaatacaaaaaattagctgggcatggtggtgggcgcctgtagtcccagctactggggaggctgaggcaggagaatggcgtcaacccgggaggcgcagcttgcagtgagccgaaattgcgccactgcactccagcctgggcgacagagactctgtctcaaaaaaaaaaaaaaaaaaagtgtctttcaacgccctcctttcctgctcatgctagtggcagtcccaggccagacctttatctctctttcctaataactaggctattaaccatctcccccatccagccatttaaaagcctctgccaaggaatttttcccaactatagatttcatcctgagtcccactttatctggcccttagcccctacctaagaacagcatggtggtctctgcaggacagtgtttacactccttagccctgaattcaaggccctccaggatcctggccctgcccacctttccagccagatgtccagtaatgccaactggcccacactgggggacctctgtctcaactccagaatctgggtaaggcatctccacgttcacctcaaaatctctcctactcccaaatgaaaccagatgtccagttactctctcattagtttatttatttgtataaggcctgcttacccaaaaagtccataaactcttaaaataattacatcttacacctagtgcctccatataacactaggcagttgatgctcaccacattttttgtctcctttaaaaattatttatttattaacgatgaggtctcactatattgcccaggctggtctcaaactcctggcctcaagcaatcctcccgctttgacctcccaaagtgttgagattacaggtgtgagtcaccgcacccggacaagtgaaaccaaccatgagatgctgagggcctgggctagggtggtcacagtggaaatggactgttgaaagccagaaggtccattttgaactctcctaacagagctgacctcttgctccatgatgccaaactctcctagttttgctcataccacttggcctaattctctactcaacctctaaatgctggagtctccccaaagctttgtcctagggctttctgctatatatatcctctccccatatgatctccactgttcccttggctctaaatatctttcgagattgtcactggtatttctaagactaaatctatggtccaagtccactgggaacactcaacttgaacgtttcacaggtatctcaaactaattacttccagaaataggaatttgacatctggtggtgaacacagacctaccacagctgtcaatgtatgtcaatataatgctatcaagagcaaaagcacccttggccccactttaaaaaaaaaaaaaaaaaaaaaaggaagtaaaagcttcatgtggcctgtactgttacttctctatggaaagccacaaggcctcaaaaccagcaaaacatctgcttctcagagaccagcctttagcttgtggtttaccagaaatgtagagtagccctgaaaatcgaaacaaagacgaccactcacagtagtcaatgattggaaggggtcacacgtgaaagagacttctgttgcggctgtctcctttccctctataaattcatcgctcttcaaatgaagaccccgaagtttttaagactttaacaattaacactattgacttataaatcaacaggccctataagcctctaaatgcaagttcatggagacagtctgtttcttaagagtcttctagttgttgagctgaaattcggcatttccagtgctgaaattcaaggtctcatgaattatttctgtgtccattagtttttctatcactcccagtgtatagatattagaatagcaggatgccaagggtaaaggaggaaggaaatatagaaggcaagtcactgacttggccactgctgccagcgctgggcagctctgctgtttatgctccccagctcatagcctgcccactctcagacgcacgaactgagcgtcttgagatgttggcacttgtttctctggtgtgttcatgcccaaccaacccaactaggtgctgctccttggaaacataaaacaagtccttttctgtttgtgtacccccatagccaggtgagatccaaatataaataaatatttatggcaaggagattgttgctttgtgttacaacttacgtttatgattttgtgctctaatttttagataaactgctatagttttccactattgagctgaatttcgtatcaccatcaaaagttacctacctacaagtccctagtagagaaaatttaacttctggctttaaaaaagtaagttacctgaacccagcattactagccttgggttttaatagaacctggaaagctctgttttgcattttcgctacagtggaaagaacgcaaggttcagacttggaagccatgtgatctagtctgctcctatgttccaaaaaggaaattctgacatggctgtttagacctagccactttagaaacagctatattggaataaaaataacaataacataaaaataaaaataaccacgtcaaaatgcattaaattaatgtgttcaaaagttcctcatgctattgcttgagcccaccccctgtcatagtcccccaagccttgtgcctcagcctcactggtctgcctagatactggtcctcacctctccacctttgggatggcacgtggacctggtgcaagtagcatcaccattaacctactgatgagtacaaacggcattgatttttacatgcgtcatggtatgagaaaggcagggaaacaccaccctagaacaataaaaatggtgaacactgagcgctataacgtgccagccactgtcttaaaggctctaatgcactagctcatttaatcatcacaacaaccttatgaggcagaggctactgctattcccatcttttaggtgggaaaagtaaccatgtatcactaaatccttgaaccaggctgggagggtcaagggggaccagtgtaaaaaattgggaagcctcagagctgtggtgggcctaggaatggagccgagggtgcagacaagggatgtgatgatgtggctgctgcctgtgtttgcatcccaagatattgtttcccaaaaattctatgtgtggatagagaatactgggctgagagtaaaccctgaaagggtaaggtgtgcaaattcccctcatctacacatgaaactcccagcacatctcattctggcgtcatcccaggtgctggacctgacccctatctgcagtagcaagagagcagaagacaggggctaagctacaaaaatggctaaaagatacctctgcattaacccctggctgagagctttcaaaattaactccctctggtgaattttaactagtgtatcacagtcagaaactcaccatgacttctgaaaagggacatctactcagtcctcttacataactgtttggaaaacactgtaggtattaaaatgattcccactgtgaaaatggctccttctgttttaccctgatttctgcacaaaattttatgttaataatttattggttcacaggggacagaaaagcaggcagatctgctagtaagcaaactacagctcccccgaggagacacacaggcagtgggtaagaggaacagacccatggctccactgaagacacagagcagcagacgaaaaagacatgtcctaaatgttaaatggtaaggaggggtagggtgaaaaaagggaacatggatgccaggcagaagaaataaaagcctttccaaacatttgtattacatgatgctggctctcactgataaaccactggatgagaactgtacttcatccatatcatcctgttggttgcagatcccgtcaccccatatctaaaacatatttccttctggagctttactgttgatactgctttgagatgtatcatttggttttggttttacatatttaacattttaatgaaagggtgacttgagtaaggcactactttttcaataaatagcaacagaaccaatttgcctgggaggagacctgccagcaagccatgaggggcatttccaaaatttccagtataggctgctcccaatttctgcctccactttaaaaacactttgcacttactagtgttattccaggagagccagttaatagtttaatgaaactagttagagtttaaaggcagcaaatgggataatttaaaataatcatcccatttttattgatggttctcaaatctctctccagatctgacattttgccctagctcagacttgtacctacactttctattcagactaacgtcctccatagttttaggacatcaccatcccaacttgggcactgacagcccacaggccacatcctcctcaagtagcaactcatgaacccagagaactgactgaaatagttcagtgtttcttgagctccccaaggccttcaggcttctgtgcagagtggaagtggtagtggtagtggcacaagtatgctaattgccacagtacactctccaaggtaagtgtaaccgggcccattctacagataaactaaaggttaggtaaattaaatctcctggcccatccacatctaatcatcatcagggccaggattcaagtccagttctaacaacaaaagccatgccaatggtaacagagtgcgtgtgagctgctaagtacttctgtgtattaactcatgccattaaagtccgtagatgccatagggtgacccagagccacactgggtaggcccctccaggcattcctttgtcttccaaataccaactgaggtgcaggcttattacccttacgttactactggcacaagtaaaacttcttcctgcatataccttaagacgggggtctccagtccccagggtacaaaccactaccagcctgttaggaactgggccacaaagcaggaagtgagcggcaggcaagtgagcaaagcttcatctgtatttacagatgctccccctggcttgcattaccgcctgagctctacctcctgtcacatcagcagcggcattagattttcataggaccacgaatcctattgtgaactgcgcatgtgagggatctgggttgcgtgcttcttttgagaatctaatgtctgatgatctgtcactgttttccatcaccctcaggtgggactgtccagttgcaggaaaacaagctcagggctcctactgattctacattatagggagttgtataattaattcattacatattacaatgtaataataatagaaataaagtgcacaataaatgtaatgcgcttgaatcatcctgaaaccatccttcccctcagcccatggaaaagctgtcttccacaaagctggtccctggttccaaaaaggttggggacctctgctgtataccactgtagtcttataaacactgtttacttaattaacctaaacatttaaaatgtttcctttcttcaataataaattaaccttagcttactgtaacttttttcactttataaagtttaaaattaacctcatgggcctagcacctcaaatctcccccgcttctctctccccaagccagcttgccctctcttagctccctgtggccctatttctgtcagctgcagcagagttctagaagaagtgcctggcgtgctctctgtccattcccactccttccatcagtcaccatgccctctagattcattcttcacttcatggagtttcctgttcggcatgctcctcggtttttgcaagggctctgccaactacagggccacgtcatgccagtgactgcactggtctcctccctggcctcagtgtgtctccacacccctccccccaacattccagttctgggcattctgtatattaatgtgttctcttatttgaagacctgtgacaattcctagtacgtccaaactatcggtctgctagttagttaacagcctccacaattgggttcccaatcacctacaccaccatgtagtgaagttagttactgcagtaccccatcctgattcctttccctgggtttttaccaatgcctttctctcttacccaatctagaatgtcccctcttcacttctgcttattcaaacacatcaactcaactaacattcattgagccctcattctagtgaacacactgtgcaaagagcacagcacgaggcactgagtgaacaaggagcacagcacgaggcactgagtgaacaaggagcacagcacgaggcactgtgcgaagcatgttccagtttcaactctatccctacacagagtccgctctgctctctctcccttctctgaaaaacaacaattcctgtttatgactagaattaataagcacttctgccattaaaaggtctatagatcttccaccaaattgtggattcctttccagcaagaggtgagtatttcatgtcttgtgtaatcttcagagtgcctggcaaactgtaaccaagcaatatgataactgttgggtggctgcatgggtattgtttttggtcctagagttctccctgaaacataatacatgtttggtaggatggaaacaaaatttctaatcaatgttagatttgtttctttttttccaagaagaatggagaagtaaatcatattttaaaatgggattgattacttggactctcagtgcagaaaacactgttttatatctattcatctcagaggaataaagggtgtgatacttcttaaggtacttcttaagatactttaaaggaaagtttacatatatatacacatatacatatacatatacccaaacttaaactcttgaaataaaagcacatgtcggagattatatgctgtatgctggatatccatgaggaaaattttcccacaaacaacctggcatggttcagtaactaaataactacatcccccgtactggtaactagccctatctcaggactactgtgttcctgggtgcaagatgggtgtctaggcctccaccatcttcaaagcctcaatttctatgtccctggttctcttaacaatggaacagtcgtaaagcagggtagcctcttggtcctacaaagagacaagaggaggactcaactatttccaaaaagacatcttgtcttgcatgctatgttttgtcaactgtcttaaatacctttaatatctaataacaccacttccacttggttctccctctctggacatgtgtctttgaaataaatcctagtttcagcacacacaaaaaagacctgtttcccaggctagtcccagaagattctatggtaattacaacaggatcccaaatccaagccctctgagtaacagtccattcatttcttttttttttttttttttgagacggagtctcgctctgtcgcccaggtcggactgcggactgcagtggcgcaatctcggctcactgcaagctccgcttcccgggttcacgccattctcctgcctcagcctcccgagtagctgggactacaggcgcccgccaccgcgcccggctaattttttgtatttttagtagagacggggtttcaccttgttagccaggatggtctcgatctcctgacctcatgatccacccgcctcggcctcccaaagtgctgggattacaggcgtgagccaccgcgcccggccccattcatttctaaaagaagtcctctctagggtcaaatatggcagctgtttagctgacacagaggagtaataccaaagagttctcttttctgtttcctttcttttcctctttttcctaatcttccaaaggccaaagagaatgagaaggagcacttgggaaggtagatctaatataatcctgcctggctgttctaccctcctcagttcatgagtatcatgataatggacagctcctggtttaaatcattgttttattccatcaccccaccactagcaacccccagttaagattagctatagaaacataacacaaagggtgactgaagcgccaggtctttcagtgtgtgaggccagcaagagtccaacagcccctcaatgtcccagctgactcttctgatgatatgctcagaaatgtctacagaagctgagcagctgccagctcaacacaccctgccacacctgcgctatcggtggaatcagagaatgagaaagctagaaagaagctttagagaactacgctggttgaaaccctcatattactgatgaggaccataaatcatttaactgaaattaaaccaacaaatcaaaccacacatacccacaaaatctttacatttgtgacaaactatattttctagaggtggccactccaatacagattccatcccacatgctctaacaatgtgataatgacactccttcattgacaggtgggtctctctgttctctcctcctgagcctgggtagacctttgtaactgtcttgaccaacagaatgtgacagaatgataccaggtgacttctaagactacatcatacaaagcaacacagcttctgctgggctctccctctctggacacgtgtctttgaagccctgagctgccagattaaacagtccggcttgcctaaagtcaccacgctggagagaccatcagggatggagaggtgctacagaaaccctagctattctagtccccagccatttgagtcttcctagcccagactcataagtgaagaaaccttcaagatgattccaatacctcctatcacttgactgcaacctcgtgaaagcctaagccagacctgcacggtggagccattcctaaattctggtcccacagaaactgtgaaagataataaatgatcatcattgctttacattgggctaatttttattatcaggggtaacgtgttacatagcgataggcaactaatacaagattcattactaaaaccactaaaaactttaacctgttagtcactattaatttaagcaaacaaataagcaatcttccaatgatgcttccccaatttgcatgcctctctataaccttactctgccttcattttaaggcctagctcttatcaccatatgtgatatgattagataacacgatataggctacgttactgaatatatgaggaaagggcctttgttttgttcactattatatccccagcacctagaacagcacttgacaacatatagcaggtgcttgacaaccactggttcagtacaagaatgtatctggagatgattgggcttagtgttcctccaaggctatttgacctctcatcacctgttctccagtttgactcaacgtctcttaatatatattcactgcactgttaagtttctaactctctaactactactgacaaaaccattagatgttcttcgttcaaacccactagaggaactacaccatcccctccgtgatgccagctcagcatccagagtagagccagtgatttcctttgtcaacacacctgcatgccaaaaacccttcccaggaggtctcaaatatcaaataaaagttactccatttttcattcaaagaccatgtgcccaatgggaaaatgacctcatgttgtggtttaaacagcaactgcacccactagcacagcccattgagctatcctatatatacatctctgtcagtgcccctctgggtctagataattacactgagtacactgaagtcctttcattattgcaggcccaacaaaaagtactgccactgggtgaatatcagaaagcatgcatcaatgcactttcaagtcaaatgagaactggctagttaagcagcagcattaacagatgtagagattgtgccagccaaatgcctcttgccaattatggccacacagctacgcccaaattaaaaataacccaacacggccaggtgcactggctcatgcctgtaatcccagcactttgggaggctgaggcaggcagatcacgaggtcaggagtttgagaccagcctggtcaacatggtgaaaccccaactctactaaaaatacaaaaattagccaggcgtggtggcgtgtgcctgtgatctcagctccttgggaggctgaggcaggagaattgcttgaacccgggagacagaggttgcaatgagctgagattgtgccactgcactccaacctgggcgacagagcgagactcaatctcaaataaataaataaaaaataaataaaataacccaacactcataacagaatccaaatgggcatgggaggctccttctctccctacaatatcaccctacagtcgctacataaatgcccctgtaaagtggctcctaagttatgtcattaaaatgttcacctttccttggcaaagtagatctcaacacaggaggaaagagaaataagctaaaaaaagaaatgtggattgtctagaagttacaagggaacaaaaaagtagaaatcctccgtgagaggattttgcaaaaactgtaattaaaggaatctagaccagtggttgcccgatagaaatataagccaaaaatgtaagttttactcttctagtaaccatactttaaaaagaaacaggtaaaattaatttaaatgttttatttaactaaaaagatcaaaaatattatcatttcaacatgtaatcaatataaaagttagtaatgaaatattttacattctttttcttcctgctcagtctttgaaatcagtgtgtattttacactgaccgtgcatctacacttgggccagcacattgcagatgctcaacagccacaagagaccagtggttaccacattggaaagcacaggtctagaataatcctaacttctttttttgtaaaatactgaaacatccaaagcactccaagttttctattagggaggcaaaataactatactgttagaatcatgggcaacgatatcataaattcctaaaataaaaccacatagggccgttatttcaaattacataaaacttgtcttctagaagaattcgaccaaatgccaaagttcttaagatctgccccacttcccaaacaagggaaactgaagacctcgaccagcaccagggccttccgtcagctcctgatacaggaggggctcctggattttgtttccccttcttgacaatacaacatgggactgggttcctcatttgactcggttcatttaaagaatgatctcaaagaagaaaggaaaatcaatgacccctttaggaaatgtagtccagggtgggggtggaggaagcatttcaatgacaaaagccaaacctcagtcataatgcagatccctgtctaacaggtgatcattgttttttttttctattacaggcactctggtctcccgcctaccccatgcaggatggctatccccatgcagaatggctgtgactttcaagagagtcccccaagggagggtcccaagatcaggggctggtaatgggccccaccacaaggctacgctgctggcttttgtttggaacaatagcgctcccatgatacctcactcttgctgacaatattggtaatacgggagcatgaacacagctgtgtgtaaattacacacacaaacagattagatctgtatatttataaggaatacaaacatactaatagctcatttacatacacagctggatacaatgggctgcatgcagaggggagtttgagttccaaagtatttctctaaaattttacaaaaagaaatgctcagattactgctaacccaggctgagacttctgctccccccacccccatgcagtatgtcccccgaaatagagtccttttcatcctcgtttgtgatatttgagatgctatgaaggagaaacctcaacaagtgctgttagatttcacttttattattatttattattatttttagagacagggtcttgctctgccacctaggctacagtggtatgatcacagttcactgtaacgtggagcttccgggctcaaatgatcctcctggctcggcctcccaagtaggtcagactacaggtatgtgtcagttaccatgcccagctaattttaaaaatatttttttgtagagacggggttctcactatgttgcccaggcttggtcttgaactcttgatttcaagcaatcctgctgcctcagcctcccaaagagttgggattatggcatgagccactgtgcccagccagatctcactcctgtaggaaaaaaatcaatataggataattttcagttaaaaagatgtatatacatacgaagagggagacctactaaaacatctgttacaacagcatatagtaaggcagaatctttgcattttcaaaatgttttcataaactttatttgttagagcaatttcaggttcacagcaaaacggaacagaaggtatagggatttcccatatagatgggtctctggatttttcagctaattttgaaaaatagggaaaagagcaatcagcattttgtgctcactacagtaaaccaggaacacaggcatcaggagagctgggctctgattcaaaggcctgattctagcaaggcctcacagtttacttccggctagccatgaacactctctgcgcctgaggttttcgtggaaagacagcatcacaagtactcaaatgtagcgtttaaaagtactaacttttaaaatgttgaatgttccagtaaaacagttaaagaaaaaaaaaggtaataatccaactaagtaaaaatattaacttatacatatctggatagatgataagctcattacaggccctaattttattatttaaaatgtttacaacaaaactctctaattgatattctccctctctctctctttttgccttgatatggtttctataaactcttggtttaaaaaagaaaaaaggtccatttctgaggcttgggtttactgtacttacagttccaccagtaaatcgtctcccagtctgggctggagaagcgctggccacggtttgattgctccagccccaggttgccaggcaacccacacaagggggaagtctgagaaccgctgacagatagccaagtggctgaaacaacagacttctctctgtcaaaaatgtgtttgagagagccacttgcccacctctgctctctgctaaacactacatgattgtaaaatcaaaatcaaaaggccactgtaataaaaacacacttcctgctcaattactaattgttctaaagctgtggggaggcccagatcctacagtgtatggcaacagaaatgcgatactgtaaatgagataaagccagcagcatgcaagaaacctgatctaaatgcatctccgtagcttcaagtcaggagagctggtgtgtggaggaatcaactgcctaagaaaacaccaggaagaaaataatgaatgtcaagatgttaaagaaacaaaccaatcaataactacgaagctagaggtcaagactacttagtaataaaaccaagaacattctccattgttttgaaacacaatctggaggcaatgaaagttttctccctcagatggaaaggaggagcaagaaaggtcaatgacccttgggaaccacaccccctggcggttccaggtggattccctgatacttgactgtaaatgggattacaggaaatagtagcatccttaggataatgcaggacaataacaggtctgagagtctaatgcaacatttaaaatacctatggtgtgagctgggcacagtggctcacgcctgtaatcccagcactttgggaggccgaggtgggtggatcacctgaggtcaaaagtttgagaccagcctggccaacacagtgaaaccccgtctacactaaaaatacaaaaaattagctgggcatggtggcaaacgcctgtaatcccagctactggggaggctgaggcaggagaattgcttcaacccgggaggcagaggttgcagtgagctgagatcgcgccattacactccagcctgggcaacaagagtgaaactccctctcaaacaaacaaaaacaaaatatctatggtgcatgtaccaagccagtaacattgtgcccaacaccaactctatgcagcatccttccatgaaaccactgtattgaaactgtcatcttggactctggaaactatttgtagtatgtggaaggggccagcactgagtgcacagttctttatctcttctgtgccatggaccctttggcagtctggtaaagcctgactccttctaaaaatggtttatggccaggcacggctcatgcctgtaatcctagcactttgggaggccgaggcaggcggacatgaggttaggagatcgagaccatcctggccaatatggtgaaaccctgtctctactaaaaatacaaacaattagctgggcgtggtggcgcatgcctgtaatcccagctactcaggaggctgaggcaggagaatcacttgaaccagggagtcagaggtcgcagtaagccgagatcatgccactgaactccagcctggcgacagagcgagactccacctaaaaaaaaaaaaaaaaaggctgggcacggtggctcctgtctgtaatcccagcactttgggaggccgaggctggcggatcacctaacgtcgagtttgagactagcctggccaacatggtgaaacctcgtctctactaaaaatacaaaaaaaaaaaaaaattagctgggcatggtggtacatgcctgtagtcccacctacttggggaggctgaggcaggagaatcgcttgaacccaggaggcggaagttgcagtgaaccaagaccatgccactgcactccagcctcggtgacagagggagactccatctcaaaaaaaaaaaatagaaagtatgccagagtaatataactgctctatgaacacactaaataacaagagctagcagagggttttctttagctcatgcaggttttttgtttttcgggggggtgggggggctgttttgctttattatgtgacctcagatgataaacccttggagggcaaggacagcaagtttttcatcattcaatttccagtgcaatatgcagcccggtttcctgccccaagctcctaagctagccctcgtcacaccactagcccagctcctatgggggcgtgggtttccttgactctcccagtgcccagaagtgggcctggcatataagatgtgtaagaccatagtccgcaaaatgggatgtatggacacaaaagacatttttttcctatgttctctttccaacaatccatcagcctgagaaggcacacgctcctgtgaggggatgcagcctctcttcttctatccccaccactgcccccctctcacttcacaaaggcagcctcctctcccccgctcccatctggaaggctaccaggcagcactgccccaggggcactgaacaaggggacaatttaaaacattgacactggtgctgacacagtgcctagctctgaggtcaggatgagaaagactccacaagtcagacattttctgattctctgctttcaacaaaacacaaggaggtcctagtggaagtgtcatctgatagattgcggaaagtcatatctgacgacaaattatacttttggcattattatggaaagaattcaaataactgagtgacactgtaacaaaactatcattcccatctacttactcacataaacaaggtttctgggcacttacgtgtttaaaaaaaccatacaatttatttccaataaatgttaagcaaaaatgaaaattatatcaacatttacattatttcgttgttttcatcaactgtgctctaataattataatttgaaaaaacatttcttctatacttaagagctttattattaaaggaaataaccatatgcccgatttcaatacacacactttttgttgcagggaagtactaaaggtcaatcggacactggactttcaaacataaaatgtatcatcttagtataaagtccctggggaagtagaatggaaataaaaattaaagggggaaaaggataagatgcaacattggactgcttttaaaaaatgaacttgtcgggcatggtggctcacacctgtaatcccatcactttgggaggcttaggtgggcagattacctgaggtcaggagttcaagaccagcctggccaccatggcgaaatcctgtctctactaaacatacaaaaattagccaggcatagtggcgcacgcctgtaatcccagctactcaggaggctgaagcagaattgctggaacctgggaagcagacgttgcacagtggaccaagatggtgccgccactgcagtccagcccaagtgacagagcaagactccatcttaaaaaaaaaaaaaaaaaaagcttattttaaaaatagatgatagttcttgctcctcctttcatcatgtgatgtgcctgctcctacttcgttttctaccataagtaaaagctccctgaggcctccccagaagccacacagacgccagcaccgtgcttgtacagcctgcagaattgtgggccaattaaacctcttttctttataaatcacccaatctctggtgtttctttatagcaatgcaagaatggcctaattcggaaaattggtgccaggagtagggtactgctataaagacacctgaaaatatggaagcagctttgcaacggggtaatggacagatgttagaagagtttgcagggctcagaagaagacaggaagatgagggaaagtttggaacttcttaaaagactggttaaatggttgtgaccaaaatactgacagtgatacggacagtgaagaccaggctgagaaggtctcagatggaaatgaggacattattgggcactggagcaaaagtcacccttgtgatgtcctagcaaaaaagatggctgtgttgtgtttctgccctaggtatctgttgaagtttgaatttgagagtgatgacctagggtatctggtggaagaaatctctaagcagcaaagtattcaagatgtgacctggctgcttctactagcttaactcaaatgtggggacaaagaaatgacttgaagttggaatttatacttaaaagggaagcagagcaaagaagtttggaacatttgcaccctggcaatgtggcaaagaaagaaaagcttttggttgggcgtggtggctcacgcctgtaatcccagcactttgagaggccgcggcgggtggatcatgaggtcaggagttcaagaccagcctggccaacatggtgaaaccccatctctactaaagatacaaaaaattagcccggcatgatggcacacacctgtaatcccagctacctgggaggctgaggcaggaggatcacctgaacccaagaggcagaggttgcagtgagcacctctgcactctagcctgagtgacaggtgagactcagtctcaaaaaaagaaaaaaaaaaaaaaaaaaaagaaagaaaagctttctcaggagagaaattcaggcaggctgtaaagcaatcacttgctagagatatttgtgtaactaaaagggagccaagcgctgatatccaagacaatgagggaaaggccttaaaggaatttcaaagaccttcccagcagcccctcccatcataggatgagaaacctaagaggaaagaatagttttcagggccaggcatggggttttgctgccctctgcagctttgggacactgcttcccacatgcccctgtgactacatccttggctcaaagggcctctgatacagctcaggctgctgcttcagagggtacaagccataggctgtggcagcttccaggtggtgttaagtctgcaggtgtacagagtgcaagagtgatggaggcttggcagcctctgccaagatttcagaggatgtatcaggtgcccaggccagaagcctgctgcagagatggagccctcacacagatactctactagggcagtgtagaggggaaatgtggggttggagggcccacacagagtccccactggggcaccacctagtggagctgtgggaaggggccattgtcttccagacccaagaatggtagatccatcagcagcttgcactgtatgcctggaaaagctgcaggcattcaactccaatttgctgaaccctgcaaagccacagaagtggaagtgcccaagaccttgggagcctgcccctcatcagtttgcccaggctgtggcaaatggagtcaagggctattttggagctttaagatttaatgattgccctgctgggtttaggacttgcattgggctcaatgcctctttcttttgactgatttctaccttttggaatgggaatgtttatccaatgcctatacccgcattgtatcttggaagtaaataacttgtttttgattttacaggctcataggtggaagggacttgccttgtctcagataagacttaggacttttgagtttatactggaatgaggtaagactttgggggactatcgataacggataatttgtaatgtgagaaggacatgtggtttgcgggaagccaggaatggaattatataatttgaatatttgtctcctcccaaatttcatgttgaaatgtaatccccaatgtcggagatggggcctggtggaaggttactggatcacgtgggtggatttctcatgaatggtttaagcaccatcctctgggtgctgtgcttgcaatagtgagtgagttcttgcaagatctggttgtttaaaagtgtgtagcagccccacccccttgctccttcttccaccatgtgatgtggtgttcccgcttcagcttccgccataagtaaaagctccctgaggcctccccaggaagtgcgtagatgttggtgtcatgcttgtacagcctatagaactgtgcgccaattaaacctcttttctttatttaaaaaaaaaaaaaaagataatgggtataaatcactatggtatttaaaattcacttgtaatatttaaaagagtgaggggacaattttatttttaaatgtcaatgtttgtaattttggaagttacatccttatcataaaaaaagtcaatttaaatttgggagtgggtatgcgctttcaggcaaaattcttttaggggcttcatagggataaaatatttttcttagctttgtatctacctaaaggaagacccagaaattctttggggtaccaagcatgcttccacatctcagctatatttagtctggttttacctaacagaaacaaactagggtcactgaaaacactttcttgaaccaagacaggttgcaccatggaagatcttgccgtatgtaactgctgttccaccaaggtacagacttttcttcactggaattccaaagctgactatagctctgttcaaggacagtaaaaagcacaaattcttcagtgtgccaattaaagtgcttggcaccttccattctgtcacttcagcctggactctcacatacccacaccacacccaagcatctggactcttttttacttattttatttttcagccatcatctacacatgtagatgggccagccccaacacccagtggttgaagacaataatcttcataagcaggaaattacagaggtgatcttggttctgaaccaactgcagaagaagacagatagacaatcgtctccatcagcaaccacctgcggcaggaaccccacctttttttttttatgttcggggatacatgggcagaacgtgcaggtttgttacatagtttacacgtaccatggtggtttgctgcacccatcaacccatcatctacattaggtatttttcctaatgctatccctcccctacccgcccccaccccccaacaggccctggtgtgtgatgttcccctccctgtgtccatgtgttctcactgttcaactcccacttacgagtgagaacatgtggtgtttggttttctgtccttgtgttagttttcacagtgtcgacggtctttacaatttggcatgtttttgcagtggctggcgcctgttgttcctttccatgtttagtgcttccttcaggagctcttgtaaggcaggcctagtggtgacaaaatctctcagcatttgcttgtctgtaaaggattttatttctctttcgcttatgaagcttagtttggctggatatgaaattctgggttgaaaattcttttaagaatgttgaatattggcccccacggtcttctggcttgtagggtttctgcagagatccgctgatagtctgatatgggcttccctttgtgggtaacccgacctttctctctggctgccctaaacattttttctttcatttcaaccttggtgaatctgaagattacgtgtcttggggttactcttctcatctgatatgggcttccctttgtgggtaacctgacctttctctctggctgcccttaacattttttctttcatttcaaccttggtgaatctgaagattatgtgtcttggggttgctcttctcgaggagtatctttgtggtggtctctgtatttcctgaatttgaatgctggcctgtcttgctaagttggggaaattctcctggttaatatcccgaagagtgttttccaacttggttccattctctgtgtcactttcaggcacaccaatcaaacgtaggtttggtcttttcatagtcccatatttcttggaggctttgttcatttcttttcttttcttttttttagagtctcgctctgtcacccaggctggagtgctgtggcgccatctcggctcactgcaagctccgcctccgggttcacgccattctcctgcctcagcctcccgagtagctgggactacaggcgcccactgccacaccgggctaattttttttttttgtatttttagtagagacggggtttcaccatgttaggcaggatggtctcaatctcctgacctcgtgatccgcccgcctcggcctcccaaagtgctgggattataggcgtgagccactgtgccgggcctgttcatttcttttcgttcttttttctctaatcttgtcttcacgctttacttcattaagctgatcttcaatctctgataccctttcttctgcttgatcaattcggctattgatacttgtgtatgcttcacaaagttctcctgctgttttttttttcagctccatcagatcatttatgttcttctctaaactggttattctagttagcagttcctctaaccttttttcaaggttcttagcttcctcgcattgggttagaacatgctcctttagctcggaggagtttgttattacccactttctgaagcctacttctgtcaatttgtcaaactcattctccatccagttttgttcccttgctggcaaggagctgtactcctttgaaggagaagaggcgttctggtttttggaattttcagactttttgccttgttttttcctcatcttcgtggatgtgtctacctttggtctttgatgttggtgaccttcagatggggtttctgtgtggacatcctttgtgttgatgttgatggtattcctttctgtttattagttttccttctaacagtcaggcccctctgctgcaggtctgctggagttttctggaggtccacttcagaacctgtttgcctgggtatcaccagcagaggctgcagaacagcaaaggttgctgcctgaggaaccccacttttatgcagaggtaaaatctaccaagcatgtggattctgaggtttcgtttcagctccagtggaggctgtgctgtgttgaccgtgtatgcaatggacacagaagaatgagtgtgcggcacttgcctgcgtctgccaccccacctccagatccaactcgagccaggctctgcctgcttctccgaatacatcctgcactctctgtgtctcctcacagggtagttctgctgtctggggagccgatattgggtgtgatgatctgacttggattcctgagtactccactcaccactgctgcggctctgaacaaattcccttactatctcatgcctatgtcatgtcgtgctcctctgtgtttccatctttctgtgtgccccatggaacttccccattctgcccagcactatgttctgggcatccaagtccaccactgccattagaacatcatcttcttgaggtggggagttcctgtccagggccacctggaggcctctgcacacgacaggcatttaataaatgtttcttcgatgacgtttcctattatcagtatctgggcctttcagagccagaaggggactatttaattattattactctcatttcttagtgagaggaccaatgactctcccaaggtacagcaactggtccaaggcacagactcaaccagaaagcaggtttaccaacacttttgtcttctcagcataaatattctaaagaaaataattactattgggtgcattttccacagatagatgaagagttatctgaaaaaagtagaagtgagggaagggaataaaaagggggaaaaaaaaaggccaggcgcagtggctcacgcctgtaatcccagtactttgggaggccgaggcgggtggatcacgaagtcaggagttggagaccagcctggccaacatggtgaaactccatctctactaaaaacataaaaattagctgggcatggtggctaataggaaacgtcattgaagaaacatttattaaatgcctgccgtgtgcagaggcctccagatggccctggcgcacatctgtaatcccagctacttgggaggctgaggcagtagaatctcttgaacccgggaggcgcaggttgcactgagccgagatcacgccactgcactccagcctcggtgacagagcaagactccatctcaaacaatcaatcaaacaaacaaacaaataaacaaacaaaaaaaaaaaaggaagaagaaccagaatttcttgtttttgaaaaatcaaactgaagaatgactggacacgatgtcagcaccactcacacaggaaacctcacgcatgaaacctcacacaacagcactgcagctctttcgcttggttaacttggggacagccctgagacatgagatcggcctttacagccttcttcccaggctggtggaagatcaggctgctctgaatccaggccggctggaattggcggggcctctcaacacagtcaagaatggctaacggcaggcagaaacattttgtggcctaataaaggatcaaagaaatgttccttacaaagaggaaatgaattatccacacatcaagctccttcatgtcttctgtttgtttgttttaggccctccagcctgtttggataaaacatgttacactgagaaagcatcaaagaaaacgaaacaacagtgacatttaaagggaactccgccggctagacagagccccattttgggttcagctccaacttctccctgttctgtctctcctggccatggggagtattcacccacagctgacataagattatcagcaaaggttttaacaagaaccagacctttctcttctaatctttcccccaatccaaaatgtcatgaaaaaacttcaaagaatcttgttagaatttaaaaatattctactattgtgtaactcatgctgaaaaatgcacatctaggtatgaaaaacgcacagattgctctgtcaaagaccactacgtgactgcacttccatagcagagatcccatctttcctttcagctaaatttaatctgttctaaactctgaaagttattgagtcctaaagacatttatttagcaggtcctaacaatgagcagtttataggcaattgtgaaacatgaccacaaagattattggatgggggtcagtaatttgaattgctagaaaaatatagatcactcttgactgacatgaatgatcagtggtatcatttacccagaattactcaagagagaatagtaacatggaatgagaagctgcttctaccctgaaggagtcacttttatagctatacaacttctaccctactcagtctgtgtgtggcaaaactagtttatcctcctcatggcatctacctgaattcatcttatttaagttaatttgcttatttgtctgtggtccctattagaatgcaaatcccatgagaacagtacctccacggttatttctattcccagagttgagaaggtgcctcgtacacagtcagtactcattgttgagtgactgaggagacaaacagcaggaatatattctacagccaacacttgaatctgcgatcttagtctacatagtcttccattcacaaaactctatcttctcgtacctttcctccaccttcaacctctccatgttaatgcacttcggctccatttaccagttaacgatttagtgatcccactgagaagccaggagctccaacagccaccgagaagcacagcacccagcagagctgcgtgtggaggcaacgctcacctccctctccatgggacctaaatgaccagcatagcacacgcttccttccttcccagcccttcctgtattcccagcccagtccagactagacgtccttctgaccagaagctcaccttagcaaatcccaactgatgcctcgcacgacgtcccctagagacctactgtcctctcacacgcagttctccaaaaggcctcataccccaacccccgagccctgctgcagctttctcactttcagatccacacagaatcccttttaacccctccagttatagggccagaagttgttttgtcaacagtagcaatcctgtctcaccgtctcatcaaccatgcccatccgggttcccccatcacagtgtcaaccacttgccaaacccatctccttcttatcctgtgaccagcaccaaagtctcttcctagctagctaagtctcttcctccatcctacctttcgacagcactctcaggaacgtggaaaaggttgcccacggcccttctaatagtctgtgtctaccattcttggtgctctttattccagcctagccatctaccggtagccatacctaagatgtgaaactacagattttccctatttactgcacagctaccatgacccccacaacatccctcttcttgactgtgtccctcaactcctctaccacttctgtactggttccccatgttctctatgcagcctggggcttaactatccattatgtcaacaatgcagtcaatactcactacctcagctgggcgcggtggctcacacctgtaatcccagcactttgggaggctgaggcgggtggatcacttgaggtcaggagttggagactagcctggccaacatggcgaaaccccgtctctactaaaaatacaaaaattagctggggtgtggtggcacatgcctataatcccagctactcaggaagctgaggcaggagaacagcttgaacccggaaggcagaggttgcagtgagctgagattgtgccactgcactgcggcctgggtgacagagcaaaattccatctcaaaaaagaacaaaaaaaatactccttgcctcaacatcccgacctcccaccaattttctagcccaatcttccacccactttggctgcatattagtgtcctaacatcctgggacactggaaacttgtaccccagatgaattaaattggacccaagtttctgctctgtgtgtctgaagttcctcatgtgactccagcgtgctaatagtgtgaagtgctgctgtacaccgacagctctcaacgtctctcactaggggcatagtcctgatccagtccagtagttctcagggcctggatgcccatgtcccaccctagggattctgctctgacttgctggggtacaggccagcattggggcattttcaagttctcccgatgactctaacgcacagccaagtttacaagacgtcctcagcccacctccactcttccaatgctactgccagactggtcttcaagggcagctccagtcctatccttccccacacattcaaaaatatataatttttcctcgtttcctgttgaattaaacataaacttctcagtcaaaagtggaaggctctgaattagctacctcacatcctcccccacccataagcttcatccaaactgggcaacaacttgctactaaccaaccactcaaattcttttagcccttgttctccaattaactaacctctgtcaactctgcccggtgaaatcctatccatccttcaaggtcctctcaaataagcctcctctacagcacccttcctgatctccctgtccaagagcagggagcaagctgctcacctcagcaggccctgtgagccccagaacaccatctgaagcaaaagaggcactcaaaacaaattttcaattgtgtggctgctgtcccctctctagattctgtggtgataaatccaactcaagcactcatttacacccactacccaaatcagtcaaggataccacagtgggatggcatgtcacctgccatactgccaagcagttaccaaggttggtggtaactcctgcagagatcttagcagtgaaagaacaaatgctgtttgtttaaagtcactgatacgctcccttccttttgtacacagaaatcaataatgttttttctaagtcttgtttccaaaaaactaagccaaataaaaaaaaagtcacttgaataatagaagaacaaactaacaatgataggaacagaagattcaactagaggaagaattatgagagcaaacagtggatacaacggtctcaaacatccagcagagccctgcacacaagagtaggaatggaaacgcagtagaattaaattcagtataagatgaaaaataaagaccttcctttttccatgtatatttttaaggtaaatttaattatccagaaacagacaaaaatgtttgctcttcaccttcaagaatccaccaccccttttgtgaagatactcaggctcagtagagtgcacccgtacacatgcccatcttcgtaacggaatgcctgagtgcctaagatgttcaaaccagtggagagtagcatggcgtgatgctcatggactcctctaaatgtgtgagcaaccggattacacatctcagagtgtggcctaaaagcaagataaatctacgtggatcatttgaatgttttacagatatttaaaaagagagggagagagaggaagggaatgtgagctgattatgaagtcagagaatttaatgagggagacaagctaccaaggtcagattgctctggggtcataaacttggaaagtgactatgaagctgacaaagaagttgggttgtctcaaaggacgatctgaaaataattttctacttttgttattgctaaaggactggagaatttcatttccatggactgaactgagcagtaggatcccaaaaatccagagcccaccccactctttaagctgctctgagaattggaacagctctgcctgatgaaatcaagacttcaacgtgggagagatcaccacagatcaaagctccaggtcttctctaggcaaagctcctttatttcttagattaatgttaggtgggtttttggtcgaggtcaaccagtttcccaaacctttgcttatcaagatctccttaggccgggcatggcggctcacacctgtaatcccagcactctaggaggccaaggtgggcagatcatttgaggttaggagttcaagaccagcctggctaacatggtgaaaccctgtctctactaaaaatacaaaaattagccgggtgtggtgacacacacctgtagtcccagctactggggaggctgaagtgggaggatcacttgaacccgggaggcagaggttgcagtgagctgagatcacaccattgcactggtccagcctgggcaacagagcaagactctgtctcaaaaaaaaatttttttttaattcattttctaaaattctcttttaaaattggataaccaagcttacttagctctgtcaccctaattaattagaggccctatctgaaaaaagaaaatgagtaatatttaggatgaacatgtctgtttggaaaacagtttattagcaaatgtgtgacacctccacagattttaatattaaacagtggctcccagagaagactccaagctgctgttgaggggagcacaagggacagaagagcacagagcatggctgcagtgatgggccatccttcctcccactctggtggagtctatggtactcattagcctgcatctctgtagcctaggagatttggtttcattactgtcaatggcaaagcttagaaaaataaaagtatgatcaaaacttacaaatcagcttcaagggagatcccagaactttcagtaacaaaaggacactgtgtgtgtgtgtacgcacacatgcatgtgtacacgtgtgttttcaaatttcttaaacaggaatgactctgttagctttagataaatcatgtggccaatttttcacctgggaagtgaaaggatggggcaggcagcagaccaagatgggcttaatcctgacctcctgtcaaacacagctgccagcacctcagaattttccccttccctttccttctccttttcctataattttttagattaaaaaaaaaaacttaagacttgctgggtgtggtggctcacgcctgtaatgccagcactttgggaggccgaggcaggtggatcacaaggtcagaagttcgagaccagcctggccaacatggtgaaacctcatctctactaaaaatacaaaaattggctgggcgtggtggtgtgaggatgtaatcccagctacttggaaggctggggcgggaggatcgcttgaacctgggaggtggaggttgcagtgagccaagatcgcaccactgtactccagcctgggcgacagggtaagactctgtttcaaacaaacaaacaaacaaacaacaaaaaaaaacccccacaaaactgaagactcaagaaggggagtggggagatcatactttcttgaggccacacaggtggcagccaatctgagtactgatacccacacctctgactctcaggccagttttctctccacaaaccaccaggcctgtttttcctgcttctgcccaccaacccaccccaaaaatgagttttccatataggaaagagaagagcctggcttatcttcttcaggaggtaactgtgccttccccagagagctcaggtgccaggacgtcagcagccctcagacagcagagccaggagggacacggggcagtggtgacgaagctgttcagggcaactctgggcatcctcctattttcagaataacaatcttcctggtgttcttagcagcatgattcctttttttattattattttttattttttagagacagggtatcgctctgtcacccaggctggagtgcagtggcgagatcacaagggagcacgattcctgaactgggggaacagtgctgagttgtatgggaaggtgtgttagaacagccagattcacctgtgctgcccactgagctctttccttctccatcactcattctcccataatagaacatctcaaccacacgtatcatcagtacacatcaggtgatgttggcaatgaacgagtttttttaattggaatttagaaaataaaaccacaaactggaaggagttggttgctccttccaaagcaagctactgagaggaaaagaacagggacacatccagttaattaattctccctagacggtggcagctcaagagctcagccaaagaggtcactgcactgaagcaatgtgaggtttctcttctgttccacccactcaaatgatattttcttattatcaatcctgctccaggtgctgggccaggttctgtgaatacaaaaagaattaaactacaaccctgccctcaagacttcctagttttgtgtggaggcacctaaatgaacttgtcaaaccaacctggtgcagcagggcctgcaaaatgcagtgacgtcccggccttcatcagtcatgggccactcctcattctaaagtgcctcgtgagcaccctaacctctcagaagaacgagtgttggggaaagaagaatatcagaacactactagggaacattaagcttggcccagcattctagttagtcagtgcacgtagcatccatcctccagacattaagaataatcaccacaggcctagagcaagcaaatgccggccgacaagggaagctggcctcttctgtcaaacagcagtattagagggactctcccctgagctgagtctcaaagccagggtatttgactcaagaaaggaagatttttgagatgactcttttcattaggtgttataattcagagcatgacatctacagttttaagttttccacagtgttcacttcctgaattaaaatttgtcaggacaggctgataacaagagtaatgactgctccaagatagaggtagagcaggtacacttttctttccaggtattttcttgctcctactcaggaaaaacagctcctctcacaaatgctgaatttatagtaaacttatgtagtaaatattgtctaaaccagttacaaaacaaaaacgcttcaatcttgacacaatgagcagctgcagaagtcagaggaatgcatgactcagagtcctacataactgaagccgtaaaaacactgttatgagagatacaatgttaggagaaaacagaacagccctcaagaattcctcattaatttgataatgtaatttaactgtgaggtacaaaataggagtgaacatctctggtctaagatcctggtggccttccgacttcatcttctccatccactccggggcatctttgctcttcctggaacacactcaggcatgctcccacctcagggcctttgcactgtttccttggcccagaattctcttcccctatgtatctgcaaggctagcttcctcactttttaaggtctttactcaaaagtgaactctccatggctaccttaagaaaaagttcaacccctctacctggtatttcctatcactttcctgcttttaattttttcaggactaacacactatacatgtcacttagcaagactgttttaatctatcctccttccccactacaatctcaactccatgaaggcagagaattttgtctgttttgttcactgctgtatcacctggcagagtgtcaatgctctaccaatatttccagaatgaaagaatgaatgaatttcaactagtgagctaaaatcagaactgaatgagaaacttggtaagtaggaaggaatcattctatcttcatgttcacacagtcaacaatcacaggaagagccaaaccgacaccaaactcctctgcaaggaatgcagagccagacagacagatcctgaggccccatgctcaggtggtgaggccaatatcaggcactgtctttctccccttataaccaccaaacacatgctgcttcctgatagctcagtactttgcctcataaatgtggaaaacacactagaattcacctatataaaggtacttcggaaaaatgtcttaaggcaagtgcaaaaacaaaatcaaatctaagtgtcaattagttgcatgcagggtgttaggaaaagaataacaaaacactactagagaagatacaaaataggctggcactctagtgaagatggcaattagggggctaccaaggccatcactacttctacctaagggagacttacttacttactttatatatttatttatttatttttttgagacagagtcttgctctgtcacccagactggagtgcagtggcacaatcttggctcaatgcatcctctgcttcctggggaggtgattctcctgcctcagccttccatgtagctgagattacaagcacgcaccaccacgcccagctaatttttgtatttttagtagagacggtgtttcgctatgttggccaggctggtcctgaactcctgacctcacttgatctccctgcctccgcctcccaaagtgctgggattacaagcatgagcctctgcgcctagcctaagggagactttagatttaagacagaagtatgccaggagagaggaggtagctttaaatgaatgacttcctctcatggtagggttctcatttttcacttcctgtttccttctcccaacattcaattccagttaccaatgtaatatgtctcacctgtgaaaatgtaagactccaatgtcactatacgtagaatgttctaagcacacgcattaaaactgactccaattctgttgctaagaaactgcacaagaaaagggttttccatcctcttcgtttataaaataaccactgtctatgggagaacaaatgcaatctctcaagtccccttgtgccttgttctcattttttaaatgaacagagaaagatgatagagagtggctgaaagtgtatgctatctccatttttttacatgcccttgaaaatgagatggaaacatggcttcaataacccactgctctagtatttattaatctttcaagctgaagactccccccattactccccttactccccgctcaagcaaaaatgaaaaatataccgtcaaaagtactcttcgatttaaaaagattatcccaagcagccaggagtaatttaaggtgtgcttatattcaatgtggggttactttccaggtctctgtatagccctgatgtctaaacacagacgtgtgcgcatgcgcgcacacacacatatacatacacacacacggccctaaagaacagcacaaggtatgctggcttttatttttttaatctaaaagtagggctggggatgatggacttaaaaaaagtaccggttaaagacactaagaaaagaataatcttgttaaacacaaagagcaaaatgggcatactaacttctttgaccacagcataaagaggaagcctagaaagtagtgagccgtggatgtgaatggaaaggtcacagctgaatctgtacatttatcccagaggcgacttctactgacatgaactactgaaatacatttttgaaatatctcttcccttctaataaaatgcttgtcctatttcatttactaaagggttttaaaaatacatttctctttagagcttgttaaacagtagaatctttctgcaaactaattgacagaactgactgccttacaccaacttttctgtgcatataattgatttttaatttgctgtctcatttccgaaaggacttgacaataaactccattctatccatactattgacttctttaagcaagggtttggttcaaaggccgatgggaattaaccataggaaaaatagtccaattttattaatagttggaacttcaggcaaatctcacttgaatctacatttttcttttttaatattaagggctaattctcactataggtcacattaagaatacataatatggagtaatatgtacatacgtgtaatatatcaacatttctatttctcttatttttcctactctcatatatacaaatttagttcttcataagaaacagtaccactgtcatttaaaactggaggaagggtggttagtagagaggagaatctactgtgattcaatttaaaatgtactaagtacctactatgtgatgcagtagatacattgtatctatattttgggttaatggcaaaggttccaaatgaattgtaaaaattttcaagttataatttctttagaaagataatttcaatgttctgactcaactcacatgtatgcaaacctgtacacatacgtaagttgacaatgacataaaaccacgtacgtacataaacaaagaccagaagagagcaagaagccagcaaatgagacgatgaagccagacactgtgagacgacgtgttagtggtgaggttttaaattccctttaatgattttaggatgttgttctaacaataaaaaaaacaatctgcacaaaaccctaaaaagaataagaaagtgaaaaggttcgtactagatgacctacaagactctcctatcatcatttttgaatgactacataaaatggtcaacaactctggaaattttaccattcctaaaataaatataactaacccttcccctatattgtggatgtaaaattttaaaacaaaatcaccaagattattagtatctgaaatccacgtaaccataactacaagctctgagagcctctctccctctttgtcattgtcctccttgctgttttcacctccacaacctcctgctgctattggatcttaacggggattttgctgtgaattccattttcctcagctgccatgcaaacagtaaataaaattcattgtatttttgccccactaagcagccccgtcttctggcacattcagatgcctagcttgaaaagagtgaacaatgaaaacaatgttttctcaagcagacattccaaaaagggcataacaaaggcatctggagatgctgctggggaaagacaccctgcaaatagttgtgtgtattctgtgtaagtaattccttgaccggccgcacgggttcactggattacaaatatttagaaaattactttgccatctcatgtcaattttgaaagaaggattttcatttatatttatgatagactgagctttaaattgaaggaagatttagatgttttaaaatttatgagcttgtaaataaatccatgtacatggccaattaaggtttatcactaccacagattaactatttttggataaaaatttcagagcttatttgtatctagattgttcacctcaatgtattacatcaaaattgatataaaatatttaatgggtagtgtatttcaagataaaagctatagttacccaagatgaaataaaaacaccctgtagtaacatggtaagcaacagaaccttcactttgtgcaacacctggattgttgcggaaagcgaattcaacatgaaaataattttaaaaaccaaaacgcagctaagtggataggaagcaaagagtgagatgcacagctcactggagcacccaatcttacaatcttgcaagtcaaaccaaactccacaaggaaaatgcaggccctgaattttaaaaagaattcaattagcatccccagtatttccataatcaacagctgaatgctaattaagagcacagcatcaagcggcaacggaatcccagtgcaataagcaccaacacaacagcagcaaatgctaccttcagctcgcatgcataaataaacagaattaataaccacccaagcatggaagggtgacttaatctgtttcgattaggtgcagttcagcctggggcctttatgttatatttgaatgtgttcatcatgtttaattaaaaacctaataatctaagatttgttttgtttgggtttttttttttaatgttttaatctctatttcctcctctttatcttcctaagttctaccaatctggatgacttcctgaaaaggaacagtatttttagcataatatatgtgaaattgattaaccatcaatgtaactctcagaggcagaaggcagccatttactttggctccacccttacccataccttggtatttaaagcttcacaaactgacctagcatttcttccaaaatgcttctctgatcaaaccaagtttacttagcctgaaagacatgacccaggtgttgctcacagacactcggcaaaagcaaaattaatttgcagtatccggtacagaatttgacagaaactggcacattttggcttcagttcaagatttgaagtgtctcagccccaaagcaacttcaattaggaacatcatacacgcacactgtcagagaaataaactgagagtttgagatgaaaggcctcctattgtgtgattctgaggtctaagatctccagaattcatgattatctgaaagacctaggaaaaagaggtcaggtgataggaggaggaggaagaggagaaggaggagtaggaagaacaagaagaaagagtttaatgtgtgagctttttccaaaagtacttttattattattattttttttggagacagagtcttgctctgttgcccaggctggagtgcagtgccatgatcacggctcactgcagcctctaacccctggactcaagcgattctccaacctcagcctcccaagtaactgggactacaggcacatggcaccatgttcagctattttattatgtttttaatttttttgtggagacaaggtcttgctgtgttgaccaggctccaaaagtaaaatttttaaggttggtttctgaggcatgtaaaagtttttctctttaatgtgctgattcataactattaactattaaaagttttaaaatgctggattgaagacactcaattatagtgaagaactttttaaaaggattaccttgaacaaagagtcatcaatattcttcaagcctctcatatggagagaaactatcttcatcattaagtccttacccttaataagtttacaaactcggaggacaatcaactcagaaataagaccgcaaggaatgaagagctggggatcagaagtcagcacgaggaggcagaggatgaactgccaagcgagtgacgcgcagaggggagacagtgcgaagagggagcactggccgcgggatgggccaggaaccgagctgagactggagaacgagtagggtctgcactggcatgagaggttagtttcttcatagagcagcaggcctgccaggcccaggaggtgcagaggcccagcctgtccgctgcacagcagggaactcacaccttcaggtgcttatttcaccaaccctctcacagagcagctgcttcaaagtattcatgtaaaaatgccaagggaaacccgttcatcaagactgttgtagtcagatcagacactgggtagttagaacaaattaatatgccagcggcagcgaagtttagtaataagtagccaggcattgtggcttgcctgtagtcccagctgctcagaggctgatgtgggaggatcacttgagcccaacagtttgagtccagcctggacaacatagcaagacccccatctcttaaaaaatagtaatgataataataaaaataataattagaatgttccaagtatatagaaaactgggaggaaaaaagggggaggtaggcccatgtatttatgttagctggaacacatttgttttgcttattcctgtgattcctgaggtgagaaaatgtggtaaatttaacagaagggggccacatgaacacagcaggtgttttttcacagccaaagccaggcgagggtaaagaggggactgccttgttgccacataaatctcttcaaagatttgatttggatccattcaccagaagcttccttcaacctctcaattattcagtcagtctctcttcttcactgctgaggttttcaaagtgaagcttcacttcctacacataagggaaccatttgatcctgaggctctacaagggctggatggctgccaagacatttttcaaaccaagaagcaaacatgataaaaatgaccccaaacggatacggatgtatacagttaaggatcattattccatactcaaaatattcaccactttggagtcctgttttgtttttcaaaataaaccaggctctttctgatgtgcaaaacttccctctcagctcacagcgacaaatcctcaagcagcagcaatggggagacaatcaacagctgcctgatgttacaagcaggcgctgcaggaaaaggaaagcagctttctcttcagcaggaagagaggactttggctgtgtatttttaaaattccagagggaatgaaaggtcacaagagaaatgaaagaagggagagaggagagccatggctagcgaggggctgggaggcatgagtgaggagtggggagggtgggagacaccaagaagaggcagggaagtggggaaggagagaggacgccaaagggcatggagactgaagagagaggagatggccaggaactgagggaaatgcagaagcagaagcagccatggattgcaagctgacaaggccctgaggccgcctaggccaggctgagaggactgaagacaatctcacaaagggtggttaaacgaccacagtctatacacttgttccatccttttcatctccttatgtgtttcttccacacaggcttttcgcagaattttaaaaccttgtcaatcagatctcttatccactcctcacataaacaggcttacagtaaaaaaacagtatcactacgacttctcaaaactgaatttaacgttgtctaaacattttaaaatgtttaagatgtttctttctctttaataataacgttaagatttttatggttttgtttgttttaaaacagcttcatgaactctgtaagtctgataaagttaaagtcttaaggaactattcaacaagcactccattaccaaaccctagggccatttcagtgcatctcagctccgcctagcttttcccattcctcagcccttgcccaccctcacccacagccattctaggagcaaattctcttttctctaccttcaaggtgcagcctggatctcgctgcttcttatcacgaccactgctgccacaccacccagccaccagtcccagcctggtgtgcagcaacccccagagaccaccggactcagcggccagtgtgagccccactgtcggagcaagtcactcctctgttcagaagctgctcatgtggggcacatcaccatgccctgacagcaggccaacaggtcacacctgatctgctccctctagggcacccctcccaccactcccctccttgctgtgttgcagaaacattcctgcctacttcttgaacatgccaagcatgctttcaccttagggcccagaattctctaatatccaaaaggctgccttcctcaccttactaaggtctcatctaaatgttacttaccaggactttcctgatcctcccttagctaagacagtaccccacccagctgattctccctcattaccctattctgtatctgcttcaccacccccggcacatactcatttatgaaggtctcccctcttaaaacttaagactcccaaggagggacaacacctggcacgcaagcaggcactcagtaaatattgctgaatcaatgaaagagcgggatcaggaaagcacatacaatttctaaacattctttcttagcatattttaaaatacaggagaggaacttgcaatcaataggtgtattagtgccagccttcatttaaatttcattcgacctgaaaggcaaatgtcaagcggtaacattcatactgaagactgtatttgcaaaagcacaagaaatccgtaagtcgtttacagcaatgccttttacaagtcacaagatggagatgtagcttcattaaaactgtctgctggatgggaatccatgggtttgcaaggctgtatctgtgggcacatttctctccccccacttccttcaacaggccacagcaatacaatcagtatgtaaaatccagcatatttatttcatcaactctctgcttcccgcttgtaatcaatgtcctttaaggaggtcaggggtcttacaagccctataaaaacaagtcaccaagccaagcatggtagagcatgcctacagtcccagctacttaagaagctggggcaagaggactgatggagcccaggagttcaaaaccagcctgagcaacacggcaaaacccccttctctaaaataattatgattaaaaaaaagacaagtcaccaaccctactttaggttatatgtccacgggttttaacatgctgtctttaaatagggaggtatcacaagctagcttgcaccaaaaacaagttcaaattaactttttttaggagtaactatcaatttctcctttctttccatgaaagttggacaatctttcccgacatctatgaagcctaatcttaataaaatcaagtctttctgtacaattaaggggctgaagggccccatcctcctgcctggcgctgccacggacagccattctgcatgactgaagcttctgctttccctgagcagcagggaggtcacacactgagacgccggtggcccgatgccccagagcacaaggcaaatgctggttcctgctcaccacttcgtcctcggtccagcacttctcgatgagcttgggcacaggcttcttcaccaggcgctgcagggctttgccagcatcgtaaccgctttcatgcagctaaaacaacaacaattatagttagctaactgcaccaaataacagacaggacacaatcgatccaaggcaagctcctcattgactatctcccacagaagagtcaggaaaggggcactgagactccatcatttcagtaggcgcaggaatttgttctcatccaagaccaccctatcccaacccctattctactcactctgggagagggaggcaggcaaggcagaaaatattttggcaaagataggaataggattcccctatattcccataaagcaaacatttagggaatgtttggccccgcccagtgctcaggacattccatgcaatcattatcttacttaatcctatggggaaagtattctctcatttaatctacggtttaggagctatcatcgccctacttcacagatgaggaaactgaggcacagaaagatcaagtaaagatgttcaccacactgagccagcaggtggtgaagccaagactccaacccagccaggaggacccctactcttgcctcattctccgcaaagcagcgtaaagtcacactagattatgttctttctttttagcatttcttaagttttttgactgtgctaatttcacacaaaaacaaaatatttaaagtggctaaaatttaagagctttttaaagaaagtaagtctgtaatagtatgctagtttttcagtacatatgaataaagatgcaggtttatctacatattccctttaggaccagacttgtttcttgtcaaagctaatcaacttttctcaccctgcgtcttttcaaccctgtgtagtgtctggcaccatggacaccttcccacctcgcaaagatgctccagacactccaagtttctgagttccaacttgcagataatgtagagaaacagcaggtacaaagatcctcctgctctatctacctccccatactgtggctgtcactcagaattctcattggaaatccacctttcctgtacacatctagtcttcttacacaaagattggctttgtctaagacttgcatctccagtgctgaacacagtccatagtataaggtaatactccagaaaaacttgctaacttcctaaataaaatactaggttctgggacacagcagtaaacaacacagagatccccgttctcatggagtggacgttctgatcttttcactcgtgcttcaatctcttattttaacaatgagccagcatttgccgaacattcaggtcaagtaaagctgaacattcaagacatgtaaagaataaaccttaataagtcacagtccttatttccaggaaacttacaaattggtacagatacaaaacatacaaaatgacaagatcaagtaggttgtaataattactcttgcttaggtttaggcaaagacctatggaatcacaagaggagacagccatgtgtttcctctttctaacagaagactccggaggacatgcagatgccttcctggcaactgctggagcccctgggctgggcacacagtaagctggcagtggtaaatatttgttgaatgaaatcaataaataaatgctgagacacacactgcaagtctctcttccaaacatttaactgccaacaaaaggaatatcacaaacattcattttcttttatttttttctttttttttgagacggagtcttgctctgttgcccaggctggagtgcagtggcgcgatcacggctcactgcaaactctgcctcccgggttcacgccattctcctgcctcagcttcctgagtagctgggattacaggcgcctgccaccacgcccggcttattttttgtatttttaatagagatggggtttcatcgtgttaaccagaatggtctcgatctcttgacctcgtgatccacccgcctcggcctcccaaagtattgggataacaggcatgagccaccgcacccggcccaaacatccattttcaatgctcactcagcaaaacagaaagtattaaaaatttgaatttccagagcattctcacagtttagagggcactaatttattttaaatcaagactgggaagtccaggttgtacattagctataagaataaatcaactatcttaaaacaaaacaaaacacctacaacaatgatcaatactggatcccacttgggagtggtggtgcaatgaataaatattaacttatttatttttattattatttatcaataaattcgtatttattattaccattagactcttttaaaaataaaatactattatgatttgcaaatgtttgaaaactatccaacctaggcttctttcagacgtataaaaagatctgaaataaagtcagattctcatactttgcctaatatccagaacaagcagacatttgtcaagttctataacacaatgggggtttataatcacaggtcaacgtggattggaactgaataaaaggaagaattacatgcctatttaatgcaaaaagcacacattttagtgataatttgaaatcaaatgaagttgatcaaatcataaatttttaatgaaaagctcatggcaaaattaacaacttttataagaggtaattatactgtatggggtaattataagaaaagtatgaggctaggcacagtggctcacacctgtaagcccaacactttgggaggctgaggtaggaagattgagttcaggaattcaagactaacctgggcaacatagtgagacctcatctctactaaaaatttaagaaattagctgggcgtggtggcatgtgcctatagtcccagctgcagtcccagctactcaggaggctgaggtgaaaggacggcttgagcctgggaggttaaggctgcagtagtcttgatcacaccactgcactacaagtccgggtgacagagtgaaaccctgcctccaataaaaaaaaaaagaaagaaagaaaaaaagaaaaaagggtaagtaggaaaaactatggactttggagtcaaactgcctggattccaactctagctctactatttactaggtatgcgaccttgagagagttacttatcatttttgtgccttaattttgacatctttaaaaatggataaaataataacatcaacctcttagcgacatgtgaggataatattagaaaatatatgttagctacatcttttaaaaagaaaaaaaaaatcggcctcaagtgtgatcagctttccagattacagagtagtcttctcagaaacaaaaaattttgttaagctataaacaaaaaccacttatgtgtcatataaaattacccatgttaaatgagatttgattaaaactctggtctcacatacaggaaaaaatttgaatttcaaaatcttggctgggcgcggtggctcacgcctgtaatcccagcactctgggaggctgaggttggtggatcatgaagtcaggtgttcaagaccagcctggccaacagggtgaaaccgcatccctactaaaaaactataaaaattaggcaggcacagtggcaggggcctataatcccagctattcgggaggctgaggcaggcaggagaatcgcttgaacccaggcggcagaggttgcagtgagctgagatcgtgccactgcactccagcctgagagacagagtgagaccccgtctcaaaaaaataataatagtaataagaaaaataaaatcttatgtgcctgctaccaggaaattgctcgtgagaacataaagcccactccaaaagcaaactgctgagtggatgaagctcaatcaaatatcattaatccctgtggcattccggccttttggtgaaccaagaagagttttaaactatagctggaagagatgcttccactgaagtgttgaacatctcgttgtggttgttccgtttgttagagagcatggctgcagcctgcacaatgcccctcagctgaatttctagtgatgagcttaatggggaaagaggcactcctctgaacaagtcctggcattcctacttccttcacaaaactttatttcagatggcagtttctcctgaagaagctattccagtgacacggtaactcgagcttccttccctactctgttctctatataatggcggattctctccttttgtttgacctgttgtctggctggcctcttaaaatatccctattcctcaaaaaaatagtccctattcctgagtttcccatgttatcagtaagtattgagagtccctacccgtcctcacccctacacaaagacacatctgagaagtaaaaagtgtgggattatttacccaaagtgacaaatttttttctttctttttggagatggagtctcactctgttgcccaggctggagtgcagtggcgtgatctcgactcactgcaacctccgcctcccagttcaagcgattctcctgcctcaacctcctgagtagctgggactacaagcgcccaccaccacgcccggctaattttttgtatttttagtagagatggggtttcgccaagttggccaggctggtcttgaactgacctcaggtgatccacccacctccaaagtgctgggattacaggcatgagtcaccacgcccagccccaaagagatatttcttgaatggatgaaggaagaatattattgcgctatcatcagtgtttcacaggggcaagttcaaaacttggtcaactggctgttctggtgtgccctcctccttaggaaacctaagggactctttcctccttagggaaccaaggggactctttctaaaggggcactatcttcttaatgttatagacattgacttctaccttgtagaaatcttgtctgagaaaattctgagacatctttaaagaaataccttttttttttttttttttttttttgagacagagtctcgctctgtcaccaggctggagtgcagtggcacaatttcagctcactgaaacctccacctcccaggttcaagcgattctcctgcctcagcctcccgagtacctgggactacaggcgcgccaccacacccagctaatttttgtatttttagtagagatggggtttcaccatgctggccaggatggtctcaatctcttgacctcatgatccccccctgcctcagcctcccaaagtgttgggattacaggtgtcagccacagcgcccagcctttttattaaagatacacttttaacatactagaagttgttatggactacaacagcttcataatagggaaacttacctttacaacatttggggaaaattactggcgatcaggacatctttctttccttcgacacatttactgagtgctcaactatgccaggcactctattaggtgctgggatatatcaaatagcccttctttttttctctctttgagacagggtgttggctctgtctcccacactggagtgcagtggcacgatcatggctcactgcagcctcaatctcctgggctcaagcagtcctcccacttcagccgcccaagtactaggacagctgtgcaccatgcctaacttttgtattttggtagaaatagggttttgccatgctgcccggggttgcttttttttttttttttgagaaagagtttcactctgttgcctgagctagagtgcaatggcacaatcagcccacttccgcctgaattcctgggctcaagcaatcctcctgccgcagcctcccaagtagctcagcttacaggcatgcgccaccatgcctggctaattttttttattttttgtagagacaggaactcactatgctgcctagtgcggtctcagactcctgggttcaagtgctcttcctgtctagacctcctgaagtgctgggattataggcatgagccactgcacctgccccaaataacccttcttaagacagagtctcactcttgttgcccaggctggagtgcaatggcatgatctcggctcattacaacctctgcctcccggattcatgtgattcttctgcctcagcatccagagtagctgggactacaggcgcacgtcaccacgcccggctaatttttgtatttttagtagagatgaggttttgccatgttggccaggctggtcttgaactcctgacctcaggtgatctgcccacctcggcttcccaaagtgttgggattacaggcatgagtcactgcacccagccaaagtttttctttctttagatgaggataatgttcaataaagagctaaactggatatttcaactatattccttacataaagtagaattggtaaatttatcaaaacactggctatcttaaatctctaaaaattgccattagaaacattcccctctaatacaacatcaagttctgaaggattgccataatttcatactgtgaaaaacattacgtagatttcaaattctaaacacctgatcacgaccacacagctacgtctatagtcaggaaatttaacacaggcttccccatattgctaaggtaaaatgtcctttaatgtgaataagattttctaccgttttcctaagaaggctgtgcaaaatacattgcaatgaagatggggaaaaagaaacacctctcaaacatcttacagcttcactttgtagccacagaaaagcaattaaagcaaaataattaaacctttctgtccattttgcagccaagtcaggctggtaaaatctgggattaaatgcaattttaatgtagagtatagagaactgtacattttggagctactgtaaaaagatcagtacaaaaagcagggaccaagataaagcatcttgactcagtgagcttacaatctttgaaagctagggaggggagaagcacttagatcttatgctgcccccacgcaaccactatagcaggatgtcattcagcagaaagcactttcagattcatcaccacaggtgtgtggcagtggtgcttttttttttttttctaaatccaatgatcaaggaaacatttacttgtaaatctttccgcctcttttccacatcactaaactgcatgactgcacttctacccaaataaaacctgtcttccctaaaccacaggttaagacctaggatttatgattagggaatctgataacaaaacactgatttcttgaacaatccaccagcctttcaagtcattccatctcagaactatgcctgttttgctgttttctagcaatcggcctttggtctctgggtgtgctccatggaatcctctgagatgtgattttttccttcgtttttggttgttcattgtgaaagaacaaatgtgagtgaactctttccctatgtggtgtctagccctcttctgccacaccttctgcagcagaagtccttggtgtccttgaacccagtaggacattccagcctcagaggcaggctgctcacaccatactctctttgcttccattcattcaaccaagaggtaccaagcaactctgcctgctagcaatggggagggatacagtggtgtgcaaagacaggcatgcatgaactatgcaaagtggacctcatcgcggattttggtgctaaaaacaatagtaacttctgaataataaacacttaatttggctccactataacaaaagtaaccactgtactgattcattcagagccatactgtgccacaataactagacatatttagctagttgcctaaaaagctctcagtaactaactctgggtgctacaataaattaacaactagtcaataccttctgcagcctactgaaaatagtacaggatgtgaggcaagtgacagattcttgctaatagccctgtcccgaaccagttgagttgaggttttcatctgttaaatgggcctaacaccaccagccctcagctgggtcacagaaaaatggaaagtgctaaatgagacaaaatgtgtcaagacactctgaaatgtaaaatagctgtaagctgtacagtggtatcatcatggggagtaatattttagatacatggctcttacctaacactattcaaacaagaggttcaatagagccaacaatgccggtagtcactacacatctgcaattgtcttactacagcctctgacctcctcctgattagcagaaagaaaggatcatgctacaagaaaaacatttctgcataattgcccaagttaaatctgctactctcactctgcctgacaaatcattccatgcttactttctataatttaatatatataagtgctttactggcaagcttctcgaaagaataaataatacttaatgactgcctacagtttaattaactcatgattgaacttctcatggattgctataaacattaaattatatccttcctcaaagctaccatggataaaaatcttgtttaaagctttaattctcttgcctaaacaattctgaaattccagcaaatctgtatgttgcacagagaggtgagagaatccaccttaacgcatggttataaagcatgttattttatagagcaaggatgaggccttaatttttataagattgaaaatgtgcacatgtccaagcacctcattaatattacagcagtcattaaacatctctggatctcaggcagtcttattagcataaactctgcgtattaccacaaggtttcaagtttctattctggcttctcatcttagctaccattttctgtctgcgtgatgttgcaaataaattttccttttggcatggctcagctgtcaggcacctctgttctataatgaacccatgaattacatctccctgctctgacatctctggtctcacacatcaaaatattgttcttcaattgtaatttataacttaatttaaatgtcccttttcccgtgacctttttagatcaaatggcattgcatctggcagtttctactatgccaaagcatacttttcaaatatagccattataataactatataaaaagcctacttaagttagactgcattcaggctaattaaataattccagtccatgaagaacaatattagatatcaaagtcttttgctatgcaaaatatctgtttatacatcacaagaaactgtcaaaataactgagaaaggaaaaaagtatttggaataaatcttaaaattcttcatatagttttaattaattatttcgactattaagataagtgagaaagaccttgccgaaatatgttcaaaacaaaatttaaaaatttcttagccacgtgcagtggcttacacctgtaatcccagaactttgggaggctgaagtgggcagatctcttgaggtcaggagttcaagaccagcctggccaacacggtgaaaccctgtctctaccaaaaacacaaaaattagccgggtgtggtggcgcgcacctgtaatcccagctacttgggaggctgaggcaggagaatcgcttaaacctgggaggcggaggttgcagttagccgagaccgcgccactgcacgccagcctgggtgacagagcgagattctgtcttaaaaaaaaaaaaaaaaattcttggctgggcgtggtggctcacacctgtaatcccagcactttgagagaccaaggtgggcaggtcacttgaggtcaggagtttgagaccagcctggccaacatggtgaaaccctgtctctactaaaaagaaatacaaaaattagccgggcatggtagtgtgtgcccataatctcagctactcaggaggctgaggcagaagaatctcttgaacccaggaggcggaagttgcagtgagccgagatcacgccactgcactctagcctgggcgaaaagagtgagactctgtctcaagagaaaaaaaaaaaaagaaaagaaaaatttcttataaccataattcacaaatgtcaatacattttcatttatacctccatcatcgataacctagtgccaagtcaatatatatgaaacatgtaaatgttaaaaaactagaattgaaactaagagcacaatatttatttttatttggccattatcatttcaaataatgctattaggtaccagagaggctaaaatttgtctgaatggtcttacgggagcaaaattcagggataatggaaaagacaaagaatttaactgcagagggtagggcttgagagaaaggtctagttaattttcagaaggaaatatagttattgaaccaatcttccctccctctttccatcactttctgaaactacaatgttccaggaattatgcgccagccctggagtcacatggaagaaaggagggggtcgcaacatttgctgagcagtgcacagtgtgctaggaactgtgttaggtctttatgatttcatcattccacacacctctcttccacagccagagtactaaaaatgaggaaatgaaatccagaggttcagtatgtttctctaggccacttccctagcaagtagcagcatgaggattctaacataaacccatgttctaggaagatgtccctaccctagaatgttgctactggggcagtttaggacaggcaatctggtgggagcaatgggtacggggactttttccgctgcagtgacaaagcaagcacactgtcttttcttaacttggggctaggggatgagggtgggtggaggaaaggagggagccagcagctcagaaaagaggaaagacacacatgtaaacaaactaacaaaaaaatccccatccatgaaaacactcacagtgctaaatgaaagctgatggggatgacatttgctcagtctggaaaatctaaaatgcattcacaggggaggttttgaaaatcaacaaccagtataatatgattaacttgcctatgctttatgaacagcaacaaccacataaaaaacactattctaggagaaataagcagtgctattattgcagtaaaaacaggctacacgaggcagggcggacctgcgtccttcgcttctttcgctgtcacagaagaggctgaggtaggtcatttttggaactttccagtattcaacattccttcacttaacaaagattttttcaaaggcaaaatattatagaatattcttctaaaaaggaataaacaaatggtaataatgttaatacattaatttagaaaaataaaaaaacaataaaaccattgaattaagccacattccccacgccaaacactaaatgaatggctcctgcacaggcttcacttacactttagggattaaggttgtgcctcttaattttcaagtctctgtgaaagctgaagtttatgccacaggtctttaaatgcaattatggataattaatcatttacatagttaacatgtctacagcctgacttctttttttataaatgcgagatcagccacagaatagtagaaagggagggtgcggagggtgtaggctgcttgccggggcaggaggactccacagacgcagtcaataatctactaagaagactcagcttgaggacccacaatgagtctaactctggccacagggagaaaagctcctggcacattcgtgaacctagactgtttatgctgcttttctcaataattatttgtcagctgagaaagacctatgtctggccacaagtggaaatggttcaggaccacaaatggaaactaaaatatgttttcacttactcctggcatcctcatagccttgaaaacagaaaaaaatttgtgacatgaaactgggcagaaggctggaggatgacataaaaaccacaggtctaagcatctcacgtaggcactagtgaacctactcatacatgctaaattgacctagaaagtgtatgtgaaaggctttcacacaaaaacacaaaatcaagaccagttacatcagtattaagaaacatttacagtaactgctttaaatcctacttagtagaattgaggtacagaaataactgcccccaatccaagggctcagcagtctgaatctcagtgctttgtgatgagtgattctaaggttatgcaaacaacagtccacctaatatttttggcaatgataatgaagttatggaacaacgaagaccgaagaggcatacactgatgcatataaagctccagagttgggaaaatatacaagcgactgtactttctaaaaacttcagccaagaacacagctttagtaactaagaaataagcaaaaagcctctgggcaaccaaaacagtgtccccaaaagccaaaggccctggagagccaggaagctcccactctgagctttagacacttagttacctcacaattctagctttcccaatctaataacaggtctcaaaagaaaaaatcagaaagactgtatgatttcaaaagagaagagcagcagcagacagcctgactgtgggagacacaaaaatttagcaactattatgcaaaccaaagagctcaaactctaacagttgcacattcttttgttaacggacaccagtaatgatcactcagaggcatcgagtaaaggtggacttgacttgagaagatatgaaaatgtattcctcctcatttctaaaatggaagaaaaaaagtaaagaaagaagaaaaggaggagaagagccagttttcctaaaaatgctgggataactagtactccaaagtgctgcagtggctggaatacacagcccaacaaataccaggtgtggggagaaggcaggccactcaacaaataggggagcaggaaggacaggagtggggcgccccagtgtcattacctatgaaccccagaaagttgctgggtaagggggaaacatccaagattctggaggacagggctggccaggacaacacaggttgtcagagtccagtggggctgggctctgggcagggctgtggaactgaagctaaaacagacaccagagacttgaaaaagctacagcttcaaggattgcctgagtttatcccaggccagctcaaagaccaaccttaaaacaacacaacttgcccacaagggtcactaatgagcaacaccttccctactctatcaggcccaggctaggactggtgcaggctggacccagagttttgaggggctagggtagtggctgaggaagaaacaacctgggaggtcagaacatatcaattaatatggtagttatacatgacaattttgttatctaaataaatatccttattctttgcataaggaagccaaatactccctattttataaatcaaatgtcctcacattacagaaatatcatagccactactagaaatatttttatacattctcaatatcagaaactccacactttaaataagtcataacagctgggcaaggtggctcacacctgtaatcccagcactttcagaagccaaggcaagaggacttcttgaggccaagagtttgagaccagcctggacaacacagtgagcccctgtctctacaaaaaaatttttttaaataaataaaaataagcaagtcacaacagatgcaaaaataataataatgagctattttttaaattttttttaaattttttttaaatttcaaaataagtaatatattttagtaatattttatataatagtcattttaactgtggtaggccaaaaaatgaccaccagaagatatacacatcaaatccctggaacctatgaatgtgaccttatttgggaaaagggtctttgcagatgtgctaaggatcttgaaataaaggagatgattctagataactcaggtgggccctaactccaatgacaagtacttataaaagagaggtggtgaagaaacccagactggagaagacacagacacacagaagagaaggcagcgtgaagatgagcagagaaagatggggccacagccaaaatgtgcaaacagccaccagtagctacaagaggcgaagagtgggctctgccaggaggagccggagaggtaccccactgacaacttgatgtcagatttctggcttccagaactgtgagagaacacctctctgtcgtttaagccaccaagtttgggtaatttgttacagtagccacaggaaacaaatacactaaccttcaaaaactggggataaaaaattatttaagagagctataaaaaagcattctgaggtgtttccaaaatataggaaatgaatactagggcaaatattatacattttagaattttgtagtatgctgtagaatacatgagcccttctgaaactcatgggcctgatttgttctaacaatgaggtgttcacttagattctcatcaaacaccctccccacaagggctgcagaaactcaaacatgttaattaccaaataaataaatgaatatatgattttattaaagcctttttttgttttttttttttttgttttttttttttttgagacacagtctcgctctgttgcccaggctgcagtgcactgatgtcatctcggctcactgcaacctccgcctcccgggttcaagcaattctcctgcctcaacctcctgagtggctgagattacgggtgtgcaccaccacacccgactaatttttgtatttttagtagagacggggtttcaccatgttggtcaggctagtcttgaactcttgatgtcgtgatccgcccgccttggcctcccaaaatgctgagattacagacctgagccaccaggcccggaaattttttttttttttttagacgaaggcttgctctgttgcccaggctggagtacagtggcatgatctcggctcactgcaaactccacctcccaggttcaagcaattctcctgcctcggtctctcaagtagctggaattacaggcatgcaccaccatacttggctaatttttgtatttttagtagagacggggtttcaccatattggccaggctggtcttgaactcctgacctaaggtgatccacccgcctcggcctcccaaaatgctgggattacaggcacgagccaccgcatccggcctaagcctgtttttaaatgtaaaaaggctaaaggtttttttatcaatttgctgaagacattgtgttattaatactaatataggctcaaatatgttaaaattctaactgatcaaacggtaagtggatgtttttataaataccacatatatctcaaaacattttaccactctttaacatggaaaaaaatcatctgataaagaagtttcttaaatgagtaaatgaactttctaacttatgccaaacaaaagtaaaagctgaatcacatcacattcctcagtccctgctgagcacctaggaaacaggaaggagatgcaggaaaagctgtggcatgaaggatttctgattggctaaacagcaaatcctccaaattacagattaaccagacatttctttctgtttctgagacggggtctcgctctgtcaccaggctggagtgcagtggcgcgatctcggctcactgcagcctccacctcctgggttcaagcgattctcctgcctcagcctcccgagtagctgagactacaggagcataccaccatgcccagctatctttgtatttttagtagagacagggtttcaccatgttggctagaatggtctcaatctgttgacctcgtgatctgcctgccttggcctcccaaagtgctgggattacatgcgtgacccaccgcacccggcccgattaaccagacatttcaagaaggcgctataaggtactggcctcaatttaaaccaagtttaaatagttatgtatataaatattgtgtatataaataagtgtgcttattaatttttagatgataaccacacttgcctcatagaattgttatgaagattaaatgaattcattcataaaaagcacttaaacttttgcctagcatataaatactcaaaccacaaatacatttcaattttataatcaggaagctgaccaatagttgataccttaaaaaataaaattaatagtgatgaacttaaggtcctatgactggctcaaaattcagtggaaaagctcagggtgggaaagaaatggcttatcaaaagcacatatacaaggaaaaatgaaacataacaagattacaacacaggactaaaaagaatgtgatgagcagacattcttataagctgagactgcactgagcagatgagcttttaggataactgaggggtatccctgggtcaccttatgttggtcagacctgaggagtgttgcttagtgcaggtgccacattttaaatgacaggcgaagcagaccaggaggataaataaaatggtaatatataaaaatggctaataccaccacacggatgatgcctgaaaacagtaccccctcagtaaaagaaagcagtcacaaaaggccacttattatatgatgccatttatatgcaatgtccagaataggcatatctatagagacaaaaagcagatgagaggttgcctagggctgctcaataaaaataaaaataaagaacctaattggattgtaaaagtggccttttatctccccatccaccccagagaagtttaggtaatgctctctctcatgtttagggaaaagaagaaagtggggtataaagtttgactttaaataaagctacatattatctaaaaagaaacaaagtactaaattttaaaagccatttcattcaaacaagacaaaaaataggctgggtgtggtggttcatgcctgtaatcccagcactttgggaggctgaggcgggtggatcacgaggttaggagatcaagaccatcctggctaacatggtgaaaccccgtctactaaaaatacaaaaaaaaattagccgggcgtggtggcaggtgcctgtagtcccagctacttgggaggctgaggcaggagaatggcgtgaacccaggagttggagcttgcagtgagccaagatggtggcactgcactcgagcctgggcaacagagtgagattctgttgcaaaaaaaaaaaaaaaaaaaaaaaaaagacaaaaattaaatcacgcaatttgtgttaaaatgttgttacatggaactttagaagggaatttatgaatttcttagcccaaaggaagccacacaggtgaacacctaaacacttaattttcaaaacaatagctcaaaatgtttctaaaactaaaaaattttcaaaaaataaaagttgaaaattatatattattatgctaataatcagctgaaaaggtcttggttataccagaaaacctcaactgcgtgatctttttctgcatcctcactaatgctatgattaacagcacaactttctgttgacttcaatatcctgttattacataaataaaacactggcaacagtgcctgtcaaggctgatttatatgatgtgctgttctgaaatttattggatttccataataagaaatcatagagcctatcagctttacccattagactttccaacaacaaataaaaaatcctgaacgacaagaaaacccaacatcttaccttaacccaagccagcaaacactaaccatttaatgttgactcatctggatagaaacatttaagtaaagggtgtgggtatggaatgaatgtcagaaggctcctctcacatgcttagggaaaacttatgaaagggcctcccggcaatgccttatttgggagctgagaaatattccacattcaagtcataagcactgcaaagctaatccaggtccagatactttagtgaaggccatttataatgaacaaacaaaaaatctgacaaaaattctatggacttaattttttagaataaaagagaaatgaaaatgatccttagaatagggttatctgcatattctgctatgccaacttcctaacatcaatttctggatgatcaagtgtgatatgaacttgaacttgatttatctattcaatcattcaacaaccatttagtatctctctaccatgtgtcaggcatcagactagggttagaaaacacaaataattaatactcaacagttaacaaatagtgatatttatagaccagagatgaaaaactatgaagccactgggagccttgaattctttgctgaaggagatgtgggtgtgcataaataaataagcaaacaaacatgtactctcttgaatacataaagagcttaatccaaacgtctaaaagccacccgtatctcagggaataaaactgtccaggcggaggtgaaatctttgttgcatgattataaattttacttacacacagtgaatatatagttatgtttagtgttggtgagaaaatggcaataaattactgagaaagaaaaagcaaaataatttgaattgtattagaaaccaggaaagatacctgagcccaaagaaggaaatccaatatcagtttagtaaaaataagttggcaagatatattctagaaaaccttagtctcaaatgatggggcttttctgcagtttctaagtaggaatataaaggtctattttgtaaatagccaaataaatgtaagcactcaaaggtggctaaattaaccccattaggataagacagatcatctccatgttatatagcatgatgtttacaaattatatgtcagctgcaagtgttcagatgagcctaatgcaaacactgtatgaggaaacacacacagaaatatttccacacaagatctttctggggaaacaccattacttcttcatatttaacataagcttatatttaatatataaaaatacaaataaaactttttttttttttttgagatggagtctcgctctgtcgcccaggctggagtgcagtagcgccatctcggctcactgcaagctctgcctccaggccacaccattctcctgcctcagcctcccaagtagctgggattacaggcgccaccatcacgtccagctaatttttgtaattttagtagagatgaggtttcactatgttagccaggctggtatggaactcccagcctcaggtgatccacccaccttggcctcccaatgtgctgggattacaggtgtgagccactgtgcccagccaaataaaacaattttacatttataggtgttcacatttgaaatattaaaataaaacatatcattgctacatacaaaaaggaatacgcccaatgttactaagaaatccctcttttcctaatgagagagaccaacatgtttattacatcttcttcctctacagcggtacaaagctgtttcttatgtatgaaaagataagaaatgcatgttaacataaatgaacaaacaaagaacaactgtcctgaactatctgccagttcactattggaccaaaagtagcaagtcatgtggccatgaaaataagatatttattaactacctctgtgattcttcaatgaggcctctactattaagaatgtgggccggatccggtggcttactcctgtaaccccagcactttgggaagccaaggtgggcagatcacctgatgtagggagttcaagaccagcctgaccaatatggagaaaccccgtctctactaagaatacaaaattcactggacgtggtgccgcatgtctgtaatcctagctacttgggaggctgaggcaggagaatcacttgaacctgggaggcggaggttgtggtgagccgagatcgtgccatcgcactccagcctggggaacaacagcgaaactctgtctcaaaaaaaagacatacggctaaagttttatataacctgaaaaccatcttcattaaattaaaacagactcaacactccaaacaaaaggcagagcttgccaaactagataaaaaggcatgaaacaactaaagaatacaggagatgttaccttaaatacaaagaaaaaacaagattcaaagtaagaagttgtaaagagatgtaccatgcagacaacaagcataagaaaactagagtggctgtattaacattagacaaaacagacttcaagacaaagaatattagtagacacaaaaaaggttacagcagaaaggtaaaagggtcaaaagacagagaaagacacaaatattttaagtgttcatgtgtctaataaccaacttcaaatatatgaagcaaaaattaacagaatcaaaaggagaaacaaccaactctacaatcacttttttttttttttttttttggagatggagtctcgctctattggcaggctggagtgcagtggcgcgatcttggctcactgcaatctccgcctcccagattcaagcaattctcctgcctcaggctccctgagtagctgggactacaggtgtgcgccaccacacccggctaatttttctatttttagtagagacggggtttcaccacattggccaggatgttctcgatctcttgaccttgtgacccgcccacctcggcctcccaaagtgctggaattacaggcgtaagccaccgcgcctggcctacaatcactattgaagactttcatacatgtctctcagtaacatacaactaggtgataaaaaaaattagtataagagaagatatgaatactaacgtcaaccactgacactgcataacagcacacccagtaactacagagagcaagttgatggcaagtacacatgaaacatgaaccaagacacatcacatgctcagccaagaaacaaggctcaaaagatttcaaaatactgaaatgttactgagtactctttgaccactgaattaaattaaattagaaatcaataacattccaaaaaataaaacttagagaagccccaagtatctggaaattaaggaatttagtactaaataattcatgggtcaaagaaatcaccaaaaaattcaaaacatttttgaacagaataatagatcacaacaaatcaaaatttgtggtaaaatcagctatttaacatcccactttagaaagctaggaggaaaatgatcaaattaaaccccaaataggtagaaaaaaattaataacgaacagaaaccaatgaaatataaaacaaacgggaaaaaataataaaaccaaactctaaagagatcaataatgttgaaacgtctttatattgatcaagaggaaacaaattaccagccttggcaacgtggagtccatcttaaaaaaaaaaaaaaaaagaaaagaaagaaaagaaaaaaagcactttctatataaaaaaatttagatggctaaactgtgaattctggcaaacatttgatgtagaaagtaatatcaatctttcataaacatcttaagaaaacagaacaggaagaacgatttcccaactaattttttgagggagtattactctgatatgaaaaccaaagttcttattaccaaactccttattacaaagaaggaagactacaactcagtatctctcatgatcacaaatgtaaaattccttaacaaattattagcaaattgaatccaatagtacgtagtgaccaagcaggattcatcctaggaacaaacagttccttcatatttgaaatcaatgtaattcactatattaacaaaataaagaataacaatcatataataatctcattagatgcagaaggaaaaacaaagcaactgacaaaattcaatgcccattcacaataaaaactcaacaacctggatatataagagatcattctaacttgattaaaaaaacaaagaaaggccaggtgcagtggcttacacctataatctcagcatttggggaagctgaggaggatcacttgggcccaggagttcgagaccaggctgggcaacatagtgagaccccgtcactacaaaaaattttacaattagctgggcatgatggtgtaccctgtagtcttagctacttgggaggctcagacaggaggattacttgagtctgggaggtcaaggctgcagtgattcaagattgctacactgcactccagcctgggcaatagaccctttctcaaaacaaacaaatacaacaaaaactgcattgtacttaatagtaaatgactgaaaactttctaagattagaaagataatgtccactctcatcacttctattcagtattatagcagaggttcaaggaagtgcaataaagcacaaaaaagaaataaaacacatagatcataaaggaagaggtaaaactatatttgcacacgacatgtttagcaggaccaaaaaaagccaacatataaaaactgattgtgtttctatgctatcgaagaccatttagaaattaaaattttagttacaacagaatcctcaaacaggaaatacttaggagtaaatttaacaaaatgttgtaagatctgtattcccaaaaaatcttattgtaagaagtaaaagaaagcggggcatggtggcatgcacttgtagtcccagctactcaggaggctgaagcaggagatcacgtgagccaaggacttcaagcccagactgaacaacatagcaagacctctttaaattttttttaatcaaaaaaaaaaaaaaaatcaaagacaacttctttaaaaatagagaaatatcgtatttatggattagaagatccaatattgttaggatgtcagtatttcccaaactgatccataaattcaatagaatcccaattaaaattccatcagactttttattttttattattattatttttttgagacagagtttcactcttgttgcccaggctagaatgcaatggcacggtttcggctgactgtaacctccgcctcccgggttcaagtgattctcctgcctcagcctcctgaatagctgagattacacgcacgtgccaccatgcccggctaatttttatatttttagtagagacgaggtttcaccatgttggccaggctggtctcaaactcctgacctcaggcgatccgctcacctcggcctcccaaagtgctgggattataggtgtgagccactgcgcctgcaagactttttaaaaattagaaactggaaggctgattctaaaatttacatggaaatggaaattacctcaaatagccaaagcaatctttaaaatcacatttaaagcagaaagacacccctgaggtcaagacttcctatatagctacagtattcaaaacacagaggccctaataacgatcaatgagacagaatagaatccagaaaaagatccaaacataaaaaagcagctgattttcaataacaatgtcaaggcagtcaaatgagaaaagtttttccaaccaatattgttcaaacaacaggtatctgtgtggaagaaaatcaattttcactccataattaacgcatcacaattcaaaatgaatcaaagacctaaatgtaagaagtaaaacttctagaataaagcacagaaacaatctttgtaatcttggagtaatcagagatagtaccataaaaggaaaataatgacttattaagcttcagcataactatatattaaagtcaacattaaggaaaaaaagtcaggccaggtgcggtggctcatgtcttaatcccggcattttgggaagctgaagtgggaagatcacttgaggccaggcattctagaccagcctgggaaacatagtgaggccctgtcactagaagaaacaaacaaacaaacaaaaactctaaaaaaaattagacaggtgtagtagcctgtagtcccaggtactcaggaggttgaggcaggaggattgcttgagctcaggagtttgaggttacagtgagctataatcactctactgtactccagccttggtgacaaagtgagacttaaaaaaaaaaagaaaaaggaaaaaaaaatttttttaaaagaatgaaaaaaagtcatggtatgggacaaataattcccaatacatatatcaaaggacttctacctgaaatattaacaaacaatccttataactaaattgtaaaacaaatttttttaagtaaacaaactatttgaacagaggcttcacaaaaaaagataaacaaatgggcaataaaacaggaaaagatgctcaaccctattaaattaggaaattccaataaaacctcaatgagataccagactacacatccattaaaatggataaaatttaaaaaaaaataactgacaacaccaagtcttggtgaagatgctaaagacgtaaaattataacacactactgatgggaatctaaattggaaccactttagaaacctgtaggccgggcgcagtggctcacgcctgtaatctcagcacttcgggaggcccaggtgggaggatcacgaggtcaggagatcgagatcatcctggctaacacagtgaaaccccatctctactaaaaatacaaaaaattagccaggcgtggtggcgagtgcctgtagtcccagctactcgggaggctgaggcagaagaatggcgtgaacccgggaggcagagctcgcagtaagcgtagatcgcaccactcactgcactctagcctgggcgacagagcgagactctgtctcaaaaaaaaaaaaaaaacctgtttgacagaacaggcgcagtggctcacgcctgtaatcccagcactttgggaggccaaggcgggcggatcacgaggtcaagaggtcaagaccatcctggccaacgtggtgaaatcctgtctctacgaaaaatacaaaaaaattagctggacgtggtggcacatgcctgtagctactcaggaggctgaggcaggagaactgcttaaacctgggaggaggaggttgcagtgagccgagatcgcaccactgcactccagcctgggcaacatctcaaaaaaaaaaaaaaaagaaaagaaaagaaaagaaacctgtttgacagtttctgagagagcttcctacgtacaaacaatcctgccactccaagtatttacctgagagaactgaagataaatgtcaacataaagactcatacaacaatgttgaaaaaacttttatttataatggccaaaagcttataaacaaccagaatgttgtttaacaaggttaaagaatatgaaaaaattgtgaatatgcatatccatacaagggaatacttatcaataaaaaggggatgaactatcgatacatgaaacacaactggctctcaaaatccttatgcccaaagaagtcacacaatatgattccattcctgtaacattccgcgaaatgcaaactactccaaaatgattttaaaaaaataaaaaaaacattgaaaacacgatacttcaatggctatctgaggctggaagcagaaaatgattataagaggccatgaggcaacttttgggggtgttggaaatgttttgtatcttgacattatagtagtttcacagatttataagtagtttcacagatttatatatctgaaaaccctcaaattttttactttgaaacagagcagtttattatacataaatcttacctcaataagttgtttcaaaaattacacactagcaatctcttttgttaataatgaagaaaaaacagaataaaaataagtaatctaagagcttagattcaaaaataggtccacataattgtcataaagaactgatagctctgggcaacattgtgagacatcatctctgcaagtaaaaataaccagctgggccaggcgcagtggctcacgcctgtaatcccagaactttgggaggccaaggcaggtgaatcacctgagatcgggagttcgagaccagcctgaccaacatggcgaaaccctgtctctactaaaaatacaaaattagccgggtttggtggcacatgcctgcaatcccagctactcggaaggctgaggcaggagaatcgcttgaacctgggaggttgtggtgagccaagattgcgccattgcactccagcctgggcaacaagagcaaaactccatctcaaaacaaaaacaaaaaacaaaacaaaacaagaaaaacagctgggcatggtagtgcacacctatggtaccagctactctggaggctgaggtgggaggactgcttgagcccaggaggtcaaggctgcagtgagccgtgatccaccactgcactccagcctgggcaacagagcaagatcctgcctcaaacaaacaaacaaacaaaaaagaactgacagctcaaaaattttctaaaccaattgcagttttaaaaatgaaacgatttatttaaatttactcgtatttaaatactcctactggatgttcaacacactttaatgtggccatatagcctatttcatttaagttctatgttgccctaggaagcaggaaatatacactaattactcacaggtttcttctaaactgataaatgcctaaccttgttttaaatctatgctatactctaagaaaacaataaatgctttccacacaacaatgtatatatctttttaacttattacttaacacagctcaaatcttctattactctagggaagtaaaaaatcccagtaacttctctcacaggatattttcattcatttttcattaggaaaatgcttgcaactgaagttttcggagtcagttcaacagtgaagtacaaaaattaaaacagcacataacttttcaattcatcacaaaatatgtacacataacctaagacacctgagccatgtcaggctagtctgaagagtttcagtgtcataaaaatgaaaaattgtacaacaaaaaaatctctgggagtgctaacaaaaccttcagaaggagcttgccacaaagaaccatgggcaaaagtagccaaaatgatttctatactgaagtatggtctacagaattcttaagagagtttggaataaaaaggggaataaatcatatacattcaagaaagtgccaaaaatagacatttaattaaatatggcaagatcttcattattcaaaattcaactgatagcacagttatgaaagcaggatttttttcacaaagcttttatacagagaacaactggccagacatggtggcccatgcctgtaatcctagcactttgggagtctgagacaggaggattacttaagaccaggagtttgaaatcagccctggcaacaaagtaagacgatgtctctacaaaaaaaataaaacttaaaaaaaggccaggtgcagtggcacacacctgtaatcccagcactttgggaggccgaggcaggaggatcacttgagcccaggagtccgagaccagcctgggcaatacagtgggacctcatcttgacaaaaaaaatttttatttaattagtcaagcatgatggtgggcgtctatgatatcagctacagctcttgggaagctaaggtgggagaaaagcttgagcctgggaggttgaggctgcagtgagccaagactgtgtcactgtactccagactgggcaacagagcaagatggtctcaaaaacaaaaattagctgagtgcggtggcacatgcctgtaatcccagctacagctactcaggaagctgaagtgggaggatcacttgagcctgggaggtcaagcctgcagtgagcctgcagtgagctgtgactgtgccactgcactccagcctgggtgacagagcgagactttgcctcaagaaaaaacaacaacaaacaacaacaacagaaaaaagttcctatcaaagactttctctttgtacacacacttttaaggtattctgaattcacagacattcatatctaacctaccacagcctctactgggcagtagtatcatcaacctctgagtttcagcttcctcatctgtaaaataatcttaaaggccccttctggcttaatcatatgctcaaaataaagattttgtatttaaaactaaccaacaaaaaaatccccactaactatcctatcgaatcagtgacaatgtacacaaacacacaatatttatgacaatgtgaaaaaacattctcttatttacagaatggcatatccctagcaaaaccactcaaatgttatatcatactcaagaaacctaattatactaggaataaaaatcagccatatcacgcagatatctacgtttcctcaaaagcaagctgcacagtagatttctaaatcaggaatggggactactttcttccctctgttaggaacttttgggactgtcagtatttaagtcatctagccgcctcggattctcctatttagaaactgggacagatgatcttgaaagtctcttctaactatagtgacctctcaagaaattaaaaaaaaagaaaaaagaaaaagaacaaaggggtgcttaaatgacatttggttaatcatcagaagaggtgcttagcctcatactcaacagcctacatacacatacacaacgatgcagactatcaatatatcagaaattgattccataaatatcattagctcttcagatttaatggtttcacattagtaatgatagagaggaattatttcatgtaactttaaaatacattaatattcctatacagccccatgggatatagcctaaggccaaaacaaataaaaacaacaacaacaaacaaagaacgaaagacaactggtttcagtaatcatattgtttgcagcagtgtgttgttatctgagctgctgtgtgtttattatgggattaaagtagatgagtaattatgatggtatgtcatgcaaccaactcagtaacattagcctcatttccctttacttttaattttttagaaattattcgtgtaaaactttttatagtcatgtaaaatattaacatgttccaaagtatactttataaaaaacaagtttatgcaaaaaagtttagcttcttcccatccctccatgtgctttaaaataaatacatggtctcagaaacagtgaagtacaaaaacacggcttctagattccaatcttgggggtatgaccttaaattgtgacttaatctctctcaacttatttccttatgtctaaaaaggtgataataatagaacctagaggccgggcgtggtggctcacgcctgtaatcccaacactttgggaggtcgaggtgggaggatcacaaggtcaggagattgagatcatcctggctaacatggtgaaaccccgtctctactaaaaatacaaaaaattagctgggcgtggtgggtgtctgtagtcccagctactccggaggctgaggtaggagaacggtgtgaagccgggaagcggagcttgcagtgagctgagatcgcgccactgccagagcgagactccatctcaaaaaaataaaaaataaataaaaataaaaatagaacctagaggtggttgtgaggattaagcaagatcttctatgcacagtacttggctttgtgaggcctcagttaagtatcaggtgctattattaggatctcatttgagagtcacctcaaacctgcagcacagacacagattaggaaatgaacctgcaggtgccacatcactggcctggagcccccatggcacccaacagccaagaccacaactcactcctgagtctacaggcgacttcatgctccgcactcatcacacattccctacagccagttcaggggaaaaagaagtgtcttcccactcagggtgacttcaaaagacttactgtgttcagtgcattcagagtggtgtcatcccgagaggctgcgacacagccgtcctctgtagagcctccatcacacattcctgcaaatgccgccatgctccttcagaagaaaaggtttttcctttattagtacatagtaatatcaggacagagacttagaccttcaattttcagaggacatttccagcccagaacaaattccattactacacgcatgatgaaccagttcccagctctgcctctgctcctatttttttttttttttcttttgagatggagtctcactctgtcatccaggctggagtacagtggcgcaatcttggctcactgcaacctccacctccaggattcaagggattctcctgcctcggcctcccgagtagctgagattacaggaacaccccatgcccagctaatttctgtatttttagtagagacaaggtttcacagtgttggtcgggctggtctcgaactcctgacctcaggtgatctgctcacctcagcctcctaaagtgctgggattacaggcgtgagccatcacgcccagaccaaaaataaatttaagttcctcttcactcacgcagaaagacatatgttacttttagtcagatccatttgtattgtttcttcccacgttttagcagtactaagattttagatttgagagcatgaagaatctaaatctatgagccacaatatttcagtagatgacaatcttctgaaagaaaagtctccagaaaacatgtgaaattaagtcatctaaaattttacttaattcctctcattctgcatatcaactacctttaggtgaattaaaagtaaaaaatcatggctgggtgtgatggctcatgcccgtaatcccagcactctgggagcctgacgccagaggactgcttgaggccagagagttcaaaatcagccctgacaacatagagagagaaaaaaaatatattagccaggtatggtggtgcatgcctgtagtcctagctactggggaggacgaggtgggaggatgacttgagcccaggaggttaaggctgtaatgagtcatgattatgccactgcactccagtgtgagaccctgtcttaaaaaaaaaaaaaaaaaaaggtgagaaaccagagataaaacctcttagtcattcactccacttacacattctcatctctactgaatgccaccatgcacaacaccgttgactagaaaacagccaggtaactggggcaacacagaaaggaccccatctcaaccaaaaacaaaattaaaaatagccgggcatggtgccacgggtctataaccctagctactcaggaggctgaggcaggaggatcgcttgagctcaggaagttaaggctgtagtgagctataattgtgccactgtactccagcctgggtgacacagcaagaccctgtttcaaaaaaacaaaacaagtaacaaccaaaaaaaaaagaaaaaaagaaaaaaaagaaacccacaaacccatccagggttaaaattcagatgccctaatccttgctttcatgtttttgttgtcgttgccaagacccagaatcactacatacaaagtctgcctgcctgctctgtgacacctgctctgtgacgaccgctctgtggtgcccgctctgtgccgtgtgaggagcgaattcacacttctctctgcatcgaaggcatttgtatgttctatgcaactgccacgagggtgatcacagataaatattctcatgtaggcaagccacaaaaatgtcaagttcaggacaggcactaatgaacagccacaaagtagagacagaacatgaaatctgtagagggttttgtttttgttttaaattttactttaaggtccaggatacaagtgcagaacgtgtcggtttgttacattaggtatatgtgtgccgtggtgctctgctgcacctatcaacccgtcatctaggttttaagccccgaatgcattagctatttgtcctaatgctctccctcccctcacccccacccctctgtagtggggttttcagatgagctgaatgactgaagtactcaactggattgagaggttttggtaactgtatgtatggcctaagctgttttcctcttgaaaagttccaaaatttgatgtggggcaaacaccaagaagaaaaacattacttcatcatgaaaaaaattacttcaaactatttttctctggtaagaagagccagggtcccgattacagagggtgtaaccaaacttaaagtcagagaacgcccaatatagaaataaaatctcaggggaaatgcaaagtttactgcctataatcagttcagatggtctaattcagaaagcaggatgggggtagattcctattaccttgctgccctcaagtacataaggaggtcacagtcgttaactccaggcatccagaccagttcctcatgttgggtcactgtatcaccatctggagaaggaaatggttgcagatctggaagtttggcctgtaagacagggatgagtaagtcacaatcaaggcatgtattaattataaagagctatctcaataagcagtctttaggaacatatacaatgttttactgagactctttccttggacagcagaaaaataacaacaaaaccatgagtcatttaaactgacctatttcacatgtcaggatcatttcaccatagaagatttcacaatagactgcttaatatctgcttaacagtgtcaaagtaaaccagtgccagcatgataccaagagtaaaactgaagcacacacatatgcataaaataaacaaaaaaacaaaataatgtctttagatgataacagctattgataaagaaggaaacacacatacatttccaatataacaagttgacaaagaagacatatgcaaatgatacctcacctaaggatatttgctaaaaaattaagtgagctatcctattagaatagtgttactcttaagacagtcaatagcaatataagtcatggtcaataccaaaactagatgagtattaagtaaacattaaaaaatatagttgaggccaggcctggtggctcacgcctgtaatcccagcactttgggaggccgaggtgggtggatcacaaggtcaggagttcaagaccagcctggccaagatgctgaaaccttgtctctaccaaaaatacaaaaagtagccgagcacggtggcgggcgcctataattccagctactcaggaggctgaggcagagaactgcttaaacccgggaggcagaggttgcagtgagctgagatcgtgccactgcattccagcctgggagagacagagcgaaattccatctcaaaaataaaataaaattaaactaaattaaattttaaaaatttatatatagttgaggctgggcatggtggctcacgcctataatcccagcactttgggaggctgaggtgggtggatcacctgaggtcaggagttcaaaaccagcctggccaacatgataaaaccccgtcactactaataatacaaaaattagccaggcgtggtggtatgtgcctgtaatcccagctacttgggaggttgaggcaagagaatcgcttgaacccgggaggcagaagttgcagtgagccaagattgtgtcactgcactccagcctaggtgacagagcaagactccatctcaaaaaaaaaaaaaataaaaaaaaaaaaataaatatatacacacacacacacacacacacacacacacacacacatatgtagttgaattgacctgtggtaacagaaatcagggcagtgatttctttacgaaagaaggaattgcttgtgaagaacaggaaggacctttctgggatgacagaaatgttctgtgccttgatacgaatcatcacggcagattgaaaagcatacataagatacgaacaattcgctgtacatagagtatacctcaataaaaagaatttaaaaaaatattcgagcaacagtgctccccaccaagactgtaagtgatcagatttaaatacctgtggcattttctcacccacactctgctgggacagagcaagagcaagcaggtgccatgaccaccataaccagcagagacctgtgaaaagtcagatatttgcaagatactcatgttctcatcctgtcaaatgatgaccatgggcacatgagtctgatagagctccatgggacatgaagcctgggcaaacaatttaagtgaatgcagcaggctgaatataagccagcaccatccaacagaaataaaataagaattatatatttaattttaaatattctagtagtcacgttaaacaaaatgccatatcccaatctggactagccatattccaagtgctgaacagctatgtgtggcagtggctcccgacctggatgtgcaggtgtgaagaactcaagagtgaagtggaccacggggaaatggagatagaaccgccccatccagggaatgctgccacacaggaatgggacccagtgtgtgtacatcctccatctttttccaaattccagaaatcttcacatttatgtaaaagtttgtggttttaaatgttggtattcaagtttttgaggcaactgcatagcaaaacatcacattagtaggccatgtggctctcaggctagccatcagcacccacacagctttacaggctgtcttccatgcctctaaatgtgtatcaagctgactttctccaagcaaggatgttcttctttggttaagtattgacttctctaacattgaactgagtgtcacaattagttctgcttaacacatagtgaaaatagtgggataaaattaaaacacaatgggcctggcgtggtggctcacgcctgtaatcccagcactttcagaggccgaggcgggcagatcacctgaggtcaggagttcgacaccagactgaccaacacggtgaaaccctgtctctacgaaaaatacaaaaattagccaggcgtggtggcacacgcctatagtgccagctacttgggagggtgaggcaggagaatcgcttgaaacctgggaggcggaggttcccgtgagctgagattgcaccactgcactccagcttgggtgacagagcaagactctgtctcaaaataataacaacaataataataacaacaacaataacacaacaaatgttggagtcaaaaggtctttgacactagtactgagttctgcttccccagcaccgagtacagtactgggtacagcagttctctaatgtctgttattaatcgaaaagtactattactgtgagcaggaccaacctcccccccattcttgagaaaaatggactagaaatataattagacagtttacagaaaaagaaacgaaaatgcctcttaatcataagaattgatgagttggagacggggttttgctgtgttggccgggctggtctcagctcctgaccgcgagtgatccgccagcctcggcctcccgaggtgctgggattgcagacggagtctcgttcactcagtgctcaatggtgcccaggctggagtgcagtggtgtgatctcggctcgctacaacctccacctcccagccgcctgccttggccccccaaagtgccgagattgcagcctctgcccggccgccaccccgtctgggaagtgaggagcgtctctgcctggccgcccatcgtctgggatatgaggagcctctctgcctggctgcccagtctggaaagtgaggagcgtctctgcccggccgccatcccatctaggaagcgaggagcgcctcttccccgccgcccatcgtctgagatgtggggagcgcctctgccccgccgccctgtctgggatgtgaggagcacctctgctgggccgcaaccctgtctgggatgtgaggagcgcctctgcctggccgccccgtctgagaagtgaggaaaccctctgcctggcaaccgccccgtctgagaagtgaggagcccctccatccggcagccaccccgtctgggaagtgaggagcgtctccgcccggcagccaccccgtccgggagggggggggggggtcagccccccgcccggccagccgccccgtccgggaggtgaggggctcctctgcccggccgcccctactgggaagtgaggagcccctctgcccggccagctgccccgtccgggagggggggtcagccccctgcccggccagccgccccgtccgggagggaggtgggggggtcagccccccgcccggccggccgccccgtccgggaggtgaggggcgcctctgcccggtcgcccctaccgggaagtgaggacccctctgcccggccagccgccccgtccgggagggaggtggggggtcagcaccccgcccggccagccgcccagtccgggaggaaggtggggggtcagccccccgcccggccagccgccccgtccgggaggtgaggggcgcctctgcccggccgcccctactgggaagtgaggagcccctctgcccggccagccgccccgtccgggagggaggtggggggatcagccccccgtccgggaggtgaggggcgcctctgcccggtcgcccctaccgggaagtgaggacccctctgcccggccagccgccccgtccgggagggaggtggggggtcagccccccgcccggccagccgcccagtccgggagggaggtggggggtcagccccccgcccggccagccgcccagtccgggagggaggtggggggtcagccccccgcccggccagccgccccgtccgggagggaggtggggggatcagccccccgcctggccagccgccccgaccgggaggtgaggggcgcctctgcccggctgcccgtactgggaagtgaggacccctctgcccggccagccgccccgtccgggaggcaggtggggggggtcagccccccgcccggccagccgccccgtccgggagggaggtgggggggatcagccccccgcccggccagccgccccgtccgggagggaggtgggggggtcagccccccgcccggccagccgccccgtccgggagggaggtggggggggtcagccccccgcctggccagccgccccgtccgggaggtgaggggcgcctctgcccggctgcccctactgggaagtgaggacccctctgcccggccagccgcccagtccgggagggaggtggtgggtcagccccccacccggccagccgccccgtccgggagggaggtggggggatcagccccccgcctggccagccaccccgtccgggaggtgaggggcgcctctgcccggccgcccctactgggaagtgaggagcccctctgcctggcgagccgccccgtccgggagggtggtgggggggtcagccccccgcccggccagccgccctatccaggaggtgaggggcgcctctgcccggccgcccctactgggaagtgaggagcccctctgcctggccagccgccccgtccgggagggtggtgggggggtcagccccctgcccggccagccgccccatccgggaggtcaggggcgcttctgcccggccgcccctactgggaagtgaggagcccctctgcccggccacgaccccttctgggaggtgtgcccagcggctcattggggatgggccatgatgacaatggcggttttgtggaatagaaaggcgggaagggtggggaaaaaattgagaaatcggatggttgccgggtctgtgtggatagaagtagatatgggagacttttcattttgttctgtactaagaaaaattcttctgccttgggatcctgttgatctgtgaccttatccccaaccctgtgctctctgaaacatgtgctgtgtccactcagggttaaatggattaagggcggtgcaagatgtgctttgttaaacagatgcttgaaggcagcgtgctcgttaagagtcatcaccactccctaatcttaagtacccagggacacaaacacttcggaaggccgcagggtcctctgcctaggaaaaccagagacctttgttcacttgtttatctgctgaccttccctccactattgtcctatgaccctgccaaatccccctctgcgagaaacacccaagaatgatcaattaaaaataaataaataaataaataaataaataaataaataaataaaaaagaattgatgagtcaacctctctgacaacagaaatgcaaattaatggcacatattcaattttgcatctatcatactgacataaagccaaatgtttgacaacacataaagccacgaaaaaaattagcactcatattagttgctagtgtcaacacaaactgatacaatctctgtggaggggaatgtggcaaaacccccaaaattatatatgcacttgtcctctaagtcagccatcccgcttctggggatatagccccaagatacactggcaaaaacatcaaaatctatatgcacaggctattcactgcagcattacatgtaatggcaaatgactggaatcaactcatatgcctattaatagggatcagatgaataaactgctacattcatacatggagttctatgaaatagtattatagaagggaatgagaaggagctctatatactgctatgaggagaacacaagaatatactgttaaaagaaaggtagcaaaaggatgtatattatgttattatttatctaagaaggggcagagggaatgaaaataagaagcttaaataataataatctcattaaaactacaccaaatggaaagaaatgcaacaattgagctggttctactctaggaactgtttcaagtaactctaagatatattaatttgcttatacagccctggcaggatatacataacaaaatgcaataccaagctgttttcaataagcatactgtttgtagccatgtgattattgctattctgggctgttatatgtgtattatggaattgaagcaaataagtaattttgttggtgtcattaaaaaatgggatttgagtcacgggaaaaaaataaagatatacataaaagaaggacagaattagtataaaggccatagaaaaatctgaatttgaattggatgtatcagcataaatttagaatgtattttatctttaagaaagtagggaaataaaacacctatttcctattctgtctactgaaaaggcctcgaaatagcaaccaacccagtaagaatgaataccccagcacccagtatgtaaataccacttcccactacaataaaagagggctcttctgagacaagtttaattccacatctagggaagacaatgtataaggtgaggcagtaaaatcatgtcttactagagaaaaacgattaagtgaaaaggacaaaaaccactgggattaagtgaaaaggacaaatacgaaggaagatgctcctactggcccaaaatggatcttttaatcatcaataagaactgattaaagttgattatagattaaaaaataaaatccactggtaccatggaaagataagggtgaagtttcatttatttgtacaaggaataaatggatggcagaattagaatatcactgttttgaaatccctaataaaataatggatctaagaaataatcagtggtggccaggcgcggtggctcaggcctataatcccagcactttgggaggccaaggcgggtgtttcatgaggtcagaagttcgagatcagcctggccaacatagtgaaaccccgtctctactaaaaatacaaaaaagtagccaggtgtggtggcgggcgcctataatcccagctactcaggaggctgaggcaggagaatggcttgaacccgggaggcggaggttgcagtgagacaagattgtgccactgcactccagcctgggcgaccgagtgagactccgtctcaaaaaaaaaaaataaatgatcagtggctgctaattacaattaaaaaagagacatatgagcctcctggcagaagcacttaccaccacccaggaagcatttttctggaaggcagggtaccaaactagaatgaggccgaacctctagatttaactactaattctcaagtcatgcaaagagcaaagtaacaaatttaatgcaatcagccaaatctagactgcagaacaccctacaggatgaaatagcttctttaccacatacactgggggactaggggaaggacctgggaattaagagagatttaagagatgtatcaaccaactgcaatgaatggctctcatttagattctaatttgaactatgaaaatataaagaaagagagaaagatacagacagacaattagggaaatctgggcatcgtatacacttgaatattaagaaattggtaatttttatatgttctgatatattgtgattgtgtccaaatcccttatttttggaacatctacaaggaaaatgatgtatttgtgaggcgtttaaaataacggcaggaagaggtgtgagggggaataaatgaaatgggtttgactaggatttgatacttgaggaagctgagtaatgaagagaaggactttactgtattattctttccctgcttttgtatatgttaatattttcctaataaaaaggttaatttttttttttaaagactggttctgtcaccaggctggagtgcaatggtgtgatcgtggctcagtgctgcttcaaccgcctaggctcaagcaatcctcccacttcagcctcctgagtggctgggactacagacatgcatcaccatgcctacctaatttttgtattttttgtagagatggggttttgccatgttgcccaggctggtctcgaattcctgagctgaaatgatctacccaccttggcctcccaaagtgctgggattacaggcgtgagccaaaagtcaaaaattttaaaaaggtaaatgttgccaattcatttttaaaagttttattatttttggtgctccaaaacatttctttttgaaaatgaagcacacagaatacatttaaaatctgatgtaaaaaaccaaacatctgattttaaatggtggtatacaaaaatccaatcacagtaaatttgctccttttccaagaatgtaagcatcttttccttaggaactacattttcttttatggtaggaaaaaaaaaatctataaaataaaagtctggtacaaagatctcaagacactggaaatacacagtgagagggaaaaaatgggtagtaaaatacagtgcaagagaaagtagagaatgggagacgaaactgagtggcattaggttgagtatcaggttcccagaccgaaaatacagccccgaggtggcagtcaggcccacctaatggaacacaccaacaaaagactctacttgaacaagcagacactgtcctcctgcagcttctttcagtctgtatcagttataaccccaggtctgggatgagaagtatcttctataaactatgtgaccctgatagtttttgtgttcacttcacttcataactccttcacttcttaagttctttcattacagagttaaaataggttatttaaaaatgtaaatgacacacaatttagaaatgctcaaaatctagacagaaataataactagacagacgactgaaatctctatgcacttccaaggctcactgctgcctgtatcccatgtctttagacatgatggccttagctgtggattccccagcatccattccaactcaagtgctaatcatgttaaactctttcctcatggtttagaaatagacacatgacccaatccatggcaacaatatgtgggtctactggggacctgctggggaaattttccttgctcctaaggggaaaagaagtccaattctttcttcctctcaacacttgctaaatttcattcattgtaagatccactgttattttatgtgcactgagaaaggataaaatatagccaataaattataaccacaccacagaatgtacaatgaagcccaactataggagcaaatgtgaaggaaaaaagtgtatcttagaattagtcaaactgagctgaggatgacgccacctccatggaggccagctgggtacaagagagtctcagagaagcacagcagagccccagtcctgcctgaccaggatgtcatgacatgggagacagaaacagagccagagtcctgtcagtgaaagcatcctaactgatactgagatcaaaacagaatatgccgggcccagtggcacatgcctttagtcccagctactcagaggctgaggcaggttggactgcttcagcccaggaggaggtcaaggctgccgtgagccgtgatcgtgcctctgtgctctagccttggcaacagaatgagacctgtctctgaaaaacgtaaaaacaacaacaaaaaccaaagagctgtaataaatgcaatgaaataagaaagagcaacagtcgtgacacagcaaccctctgactgaaaagtgtcctaaccatcttgactctcctgaaggaaaagaagttgtttatttttttgcagacagtctcgctctgtcgcccaggctggagtgcagtgtcgcaatcttggctcactgcaacctccgccccctgggttcaagtgatttctcctgcctcagcctcctgagtagctgggattacatgcgcacaccaccatgaccagctaatttttctatttttagtagggatggagtttcaccatgttggccaggctggtctcaaactcccgatctcaggtgatccgcctgcctcagcctcccaaagtactgggattataggcgagagccaccacgcccagccgggaaaagaggttttaaacatcttttatctttttttttttttttttttgagacagagtcttgctctgttgcccagactggagtccagtggccacagtcttggctcactgcaacctccgcctccggggttcaagtgattttcctgccacagcctcccaagaagctgggattataggcgcctgccaccacgcccggctaatttttgtatttttagtagaaatgggatttgccatgttggccaggctggtctcgaactcctgacctcaagagatctgcccacctcaaccttccaaagtgctgggattacaggcatgagccattgtgcctggctttaaaaatgttttaaataaaaatatgtgatcaagtgttcatcaatggatgaatagataaacagtgatacgtacatacaatgggtcatttagccttaaaaaggatagaaattctgacacatgctattaacacggatgaaccatgaggacattatgctgagtgaaataaatcaggcacaaaaagacaaatactgtatgattccattcacatgaggtacttttatgaggcagaacagtcaaaaacagagagaggaaggagaatggtgattgccaatgctgcagaagagaaatggagttactgtttacgggtacagaatttcagttttgcaagatagaaagagttctggagatagatgacggtgatggctatacaacaatattaatgtacttaactactgaactttgcacttaaaaatgggagatggtaaatgtatgtggtgatctgaggagggtggaaaaaaaacctctgtatttataaaaaattcccgatagcaataaccacattctaagatgctgcgcaacagaataaagtgccagcagagtaataagaaacaaaaacctattaaggaagctatgaaaatgaacttcacctgatgactaggaccgacacgaatctccccctgggtactgttcagcctcctggaacagaaatagagcagattaagttagcgcaatacagttttgacataaacattcacacatttttcaaaaaaagtaattctcttcaaataaatgaggaaaaactgaggaagaattaacgtccccactacttctaatgttctgtatacatacaccacccaccaccacacatgcacctctaaaaccttttcctttgaaaatcctaagaactgcagcttcctttcatgagaaccttcctacatcatcgttctttttttgagacagagtctcactctgtcgcccaggctggagtgcagtggcacaatctcggctcactgcaacctccgcctcttgggttcaattgattctcctgcctcagcctccagagtagctaggatttcaggtgcctaccaccacgcccggctaatttttgtaattttagtagtaaatttcagtaaattttgtaattttaataatttgggttttcatcatgttcagccaggctggtctcgaactcctgaccctcaagggatccgcctgcctcggcttcccaaagtactgggattacaagcacgagccaccacacctggcccctataccatcattctttcatgcctcagagagatggacattcctgtagtacaattccagtcagacatttcttccgttcaaaacatctcagggtgccctaccataagccttataaaatacaaataagaaaacttatcctaggacatatactgagccatccatccatccatccatccatccatccatccatccgtccgtccgtccgtccatccaacaaatatttaagtacctactataagccaggaattgtcctaggtgttggggataaagcaacaaacagggacaggtacagaggctcacacctgtaattctagcactttgggaggctaaggcgggaggatcgcttgagcccagaagtttaaaaccagcctgggcaacacagagtgacgccatctctacaagaaaattaaaaatcagctgggcatggtggcgcacgcctgtagacccagttactcaagaggatcgcttgagctgggaggtcaaggctgcagtgagccatgttcgcaccactgcactccaacctgggcaacagagcatgaccctgtctataaaaaaggcaacaaacaaaacagtgtcaaagaagatggcctaaaaggaggcacatgctcttgtttttctctcatggatctgatacccatacccactgtgtttgaaattgttaaaaatacattttggaaagctatcgtttcctttagggcacctgggcccagtactttcttcttttaatccaatcattttctcatgaagaatcttgcttgggcaaaggtggtggtaaatgtgacaaaggaagaaaaaaagaagaggaggaagaaggggagaaagggaggaggaagacaaggaggaggaggagaagacgaagaagaggaagaagaagaaatgtggtggcccagtcatcaagaatcttacaagcctccagctggcgaggcagcatctgtaccaaaacaccagaacaggccgatgcccgtattcatcaacataagacacttcaaaagacacagtacaaaaatgtgaaggggaggtaccaaaatgaggcggcttcaagagaagacacagaaggagataataggcctagcagcaggaaaaaaaaagaggactttccaagtagaaatgaaagcatgcagaggtggcaggctgaaagggaggggcggtgacagggaaatgcttgcatgtgggctgacttcatcatacaagtcatcttcatttcttcattaggagaatggtatgtggaaaaacgaagctaaaagatggattgttctcataggtttatgcaggaaatggaagaagctgttttaggaggtatgtaaaggaatcaaatcagccacaagttattttaatcacaagcgcttctttaagaaaaacaagcaagcagtcagcgttaccactatttcccttccaacttgtccttttctattttctaactagctgtgagcaaaacaagctgccaaaagctctaaatactttccaaatgctttcttgcctacaagtaggtctagccagaatgtatcatttcagaaaccttcagccacagcccattcagtaacttctgcctgcagctcaacctttgggttcttccagaaggtctgttactctggagttctccagtggttggatatcatttccatatcatggctacactgttaagtccttgataattccagaaaaaacattcctgcttgatttttattttattttggagatgaggtcttgctatgttgcccggtctgttctcaaaaccctgggctcaaagggacccccacctcagcctcccaaagcgctggaattacagacatgagccaccgcactcaccgcccaaccccatttttattttaataagccaatttatcatcatatttagcttaaaaaaacccaatgtaccatggtaatgaaacaaactcccaaataccctgttgactagaactacttatatctcacgtatttccataaaaataggatgcagataattattattaaactaataatacaaatgagacaaaaaaatgtattgggccatcttaagagacttgaaaattgtttaagtttataacagggaagagtactaataagtaggctataacatgaaaaccaagataaaataaggaaacttcttaaaagcttatttaaaaatccctctttgcaacaaaagtatttttaaattgtatgtaacttttaaatatcagggttctatagcaagaaatacaacaaagttctttttgagcaggtaggatctgaggtgcagacaatggcattagcctactatatgcaagagttacagaatatagaataaatggcaaaagtactttttaggtccaagatataaagaggtagatagcaacacaccaccttagacaaagcttgatgcagctgacagaaaaactgtcagaatatgagctgaaggtgaaagacaagaagtacacatggtggggaagtgccagcatccagctgtatctggatccaccgagcaatcagaatcctccttactgaactaagtatccctcccctgctgccgcactgctctcctctcttttttctttttcttttttttttttttatcctgtatccccagacagctgcatcacccttgataggtcaggcagccacaacaccccagaatgtttccctggcacatggaaaaagcacccccatgaggctgcagccaggtgcaaagtgagtctgtgaactgctcccttcttgaatgcacctttgtggttcacacctcactcattaatgatatttaaacatgacagtatcaacagcttgtaggaaacactcttttttttttttttttttttttttttttttgagacggagtctcgctctgtcgcccaggccggactgcagactgcagtggcgcaatctcggctcactgcaagctccgcttcccgggttcacgccattctcctgcctcagcctcccgagtagctgggactacaggcgcccgccaccgcgcccggctaattttttgtatttttagtagagacggggtttcaccttgttagccaggatggtctcgatctcctgacctcatgatccacccgcctcggcctcccaaagtgctgggattacaggcgtgagccaccgcgcccggccaggaaacactcttaatcatcaattgcaatcttgatgcaatgactacattttgtcttttacttaacatttctcaaacttttaggtctctgtacccttttacactcttaataattactggagtgtgtcttggtggtcccagaatctgtctcttgtttcaacaatgtctgaacagcacatatcctgggactccatctgttccagcctccaactgccctccaatctcccctccatttgcaacctccagcacccttcttctcggccatatcctgcttctgggaccagccaccactgtttttgtggttagctcctcaaccccgcaagctctgggaggcatgagtgacttcttccacgaatcggccaagaagattcagggcactgagtgtctcttgaagatgtgtgtgtggcagcggcacccatttccaggatgtggagaagccatctcaaaatgagtgggggtaaaaaccctgggttccatggaagccaccatggctctggggaagaacctgaaccagatcctcgatctttaggccctgggttctgcctgcacagacccccatcttctgtgacttccggagagccacttcctagatgaggaggtgaaactcaacaacaagatcggcgactaccagaccaacctccccaggctgggctgggtaaatgtttcttccaaaagactcaccctcaagcaccacgaggagcctacagagcccagcaaacttttaggagcccctctcaaagttcagggctactgcctaagcagcgcctccagccactaccctggacccctctcccaagccgtggacaaaacagaaataaagcttattacaaaaaataaaaataaaaattactgaacatcccaagaaatctaaatttttgaaaactttcaaaatattgatttaaaaatagcaataagcccattacataacaatatacatattcttataaaaagtaattgcatttaagcagaaacctttagtaaaaagtgaggcattattttatgtttttgcaaatctcattaatatttgacttaatagaaaagacagctagattctcctatctacttttgaattcaatctgctgcaatatattgttgtggttaaattatatgaagataatacagcctaacacagtgatgtaactagaaaagggaagaatatagcctttttgatactacaccaaaaactcaacaagttcccggcactctggggggccgaggtgggaggatcacttgaggtcaagagttcgagactagcctggccaacatagtgaaaccctgtctcgactaaaaatacaaaaaattagccgggtgtggtgttgcatgcttgcaatcccagatactcaggagcctgaggcagcagaattgcttgaacctgggaggcagaggttgcagtgagccaacatcgtgccattgtactccagcctgggcaacaagagcgaaactctgtctcaaaaacaaaacaaaacaaaacaaaaactcaacaagtaatcatttcttaaagatgtgtacacaaggtgagtctaaaagcctatcaatagtcttttgactgtgctactctgaaatccattggtctgtcttgcctttgaatgaatggatcttctactcagatgtgattttgtaatgtcatgcattggttttatagagaatgtcagtttactcagttctgcagatctttcaaatatcaaccagttctttatacagcattttttaaaaatcatattaatatcacctatctcataagaaatgcctttcagtgtagagaagctgtcaggctcagagtggtgagtacaagcttttcgaaattctaatttttacttgaaagttcaaatcttagccttgtcaaatagtatcagtgttttccttgaaataacaagctcacttaattcatcttcaagaaagtttctgccaaatgcccacgtctgaatgaccacagtttgtctgtcagttgttctttcaaagagtaactgatattccatgaaaaaagtggctagcttcgcttctaactcaaatgtctcgacggaaccaaggcttctcctcaagacaatcactgtcttttggtatagggcagaagacttttaagtcgggaagccaagtcttgggattaaaaaatactaataggctgggcgaggtggctcacgcctgtaatcacagcattttgggaggccgaggcaggtggatcacctgaggtcaggagttcgaaaccagcctagtcaacatggtgaaaccccatccctactaaaaacacaaaattagccataccgggtggtgtgtgcctgaatcctagctactcgggaggctcaggcaggagaactgcttgaacccgggaggcagaggttacagtgagctgaggtcacaccattgcactccagcctgggcaaaaaaagaatgaaactccgcctcaaaaaaaaagaaagaaaagaaaagaaagaaaagacaagacaagaaaagaaaagagaaataataataataataatgaggtccacaagctatgctctgagaagcactgattatggcacattctgaacttcagcaagtgctggaggctaaaattcatctagaagactccagctttcttctttgatgaataacaacagtagctaacatttcagcacttactatctgtcctaggtgctctacagtattatctcatttctaggtattaaggcatttaattcatgttttgatattaacagacatgttagtattgctattcacagaaattcaggtgtctttctatcctgtgttcaaagcaacacagcactacacgtggtggtgcacacctggaatcccagcactctgggacgctgaggcaagaggacagcttgagctcaggagtttgagaccagcctgggcaacaggctttataaaaaatgtttttttaattagctggtcacggtggcacgcacctataatcccacctactcaggaggctgagccaggagaatcacttgagctctggagtttgaggctgcagtgagctatgatcacaccactgcactccagcctgggcaaaacagagctagactgtctttaaaaaaacaaacaggccgggcgtggtggctcacctgaggcaggcaggtcacctgacgtcaggagttcaagaccagcctggacaacatggtgaaaccccacactactaaaaatacaaaacttagccgggcgtggtggcaggcgcctgtagtcccagctactcaggaggctgaggcaggagaattgcttgagtctgggaggcagcggttgcagtgagccaagatcatgctactacaccccagcctgagtgacagagcaagactgtctcaaaaaacaaacaaacaacaacaacaacaacaacaaaacatagctactaaagaggtttctgcttggatgtacaatgctgctgaattaacaaagtaggtctagtcaaagccagggtggtcatcaacttcggaagaaaaatccagaccaaaggcagtatgaatcctagccaagacatataaaggatactactgtatgaattaagaaaccaaagatgcaagtaatatccagaataatgcaacatacacacacatctatctttatcctcatcttaagagttttcacatacgttatcttaaatctaggtgtaggccgggtgcggtggctcgtgcctgtaatcccagcactttgggaggctgaggtgggcaggttacccgaggtcaggagttccaaaacagcctggccaatatggagaagccccacccctaaaaatacaaaattagccaagcgtggtagtgggtgcagtagtgggcacctataatcccggctacttaagatgctgaggcagaaaaattgctcaaacccaggagatggaggctgcagagagccgagatcccgccagtgtactccagcctgggggacggagcaagactctctcagaggaaaaaaaaaaaaaaaaaaaaaatctaggtgtattatagttacataacaaacacaagcaaaataataatactagctatcaattactaagtgctttctatgctgggcacatattatttcattattccacgacaactctatgaggcagtatctccataggtaataataataacaatactaattttaacattaataaagcaactaatatatccattgaacatttactatgtaccaggcattgcaaggtaagcaatttccatttattttcttatctaatcttacaggcgaccctgtaagataggtgctattgtagtaagtgtacaggtcaggtcactgaagccaagagacgttacgcagttgcccaagattaaacagcaaataagtggagaaatcaggaatcctactcaaggtcagctgactccaaagtcagagctctcaatcacactcccatatggcagaatgattaagttactgaaccaaaatcacacaattaattacaaacagaatgatgagaatccatatccctttccctattttggttctatgtttatttcaaacacccaagcaagacaaaatgatcaaaagaatttttttaagtttgaaagtcatgatgaaagagaaaaacctatcaaagttagaggccaatgtatataatactcttgaaatgacaaaattacagaaatggagacacattcgtgattgccaggtgttagagatggtggggagagggagggaggcggagggtgcgaccacaaagggagagctttgtagtgatggatagctctgtctcttcattgttgtggtggttacacaaagctatccatgtgataaaatggcacagaactacacgcacacaatctactaatgccagtttcctggttttggtatcgtattacagttacaaaagatgagaccactctgtggtatctttgcaacttcctgtgaatccaaaaaatttaaagttttaaaaaagtcaaatgaagggggggatatactacaggcagatgggaaatcagaaagaacaccagacatgagaaaagctgattaaaggacaaacagatcaacctcaaattacactgtacacagctgaaccagtaactgaagaaagagggccacagcttattagcaatgagattcaagaaattaactccaagtgacatatttattttttccttatgtttactaaggatttctgctgtggattcatcatcttggagacatctttatactgtgaatcatattacaaaaaccgaattaagaagtgtcactatcatccccagcaaaagaaggaatttctctgtgtagctaatgtaaataatatgtttttcaaaacaacttaagttcagcctacattattctacaaatctttgttttagaatatgaaaaaaatagttccagaagccaaattacaacaataatggtaagttgttgtttttattcctgaagtattaaaaaaacagaaagtcattgtatatgaaatctgatacaaaaaaaccccagtgtaacaaagcagtatccatagcaactacaacttaatatttcagtcctcttcaactgcagtggattaaataaaatgacaagatgttccctttgaaaagtaacctgttaccatggaaacgttttattctaagaagtaaacagggaatggacagaaaggagcagggagcctgtaaatgaatatcaaaaagggagaagcatctttgcagaggagatggaggtggcgatggcaggcaaagggagggtctgtgagaagagcatgcctgctagatgcaggatcccagcccaacccagaggcttggcccagaacatgatgcggccacttcttcaccctgaagaaaggggaaggggcaggaaggcaatgttctgtgaacattcaccaaagacgcccaaagatctctatgtgatcacggtgactgcttaagataggcacttgattctacaagggaagatgagggaggaggatagagatatgggaagaacacatgaacagaaggcaccaccatgaagcaactaagggcaagagctgaccccctcattcagcccctccccaagccttgggtcctaacagtcgtgtagcctgtggcccattcccaaggtgctgggacagaaaaggctcaagtcagacccttgttctgtggctggcgtcatgtatgaatgagatcactgagaaatctctctccctgtccttcagatggtaaatatcacacagcagacattcttatcttttccacagggtattaagttgagcaggaagactgacatggcatcaacagaatgaagatcttagaaacgctacttagtacacatttagaaaatgaccacagaagaagtctgtgggtccagaacaaaatacactacattttaagaaaaccaaaaggcaatttatcagaatcacttttttagatggattgtgaggtaggagtgaaagcgaggattaagaaggaagactagtgcaatatgctgggtttctcaattttccccagcatgaacacatacttcaaagctgccctgaacaagtctgaaatttctttttaaaatctaacatagtatcttaaaaagccatgcgaatgttgtattctatcccatcatatattcccattcatttttagagaaaaatttccataaatctgaataaaatcattgtgctggccgactctgggcacactttctgtgggttagccctgctccttaagaaacagcaataaataaataaacaaataaacaaacaaacattaaaagaaacatcattgtacttcctattaggatctcccatgacactgtcacacccacacctgagtctagatgttcaaaagcagggaaagagcatggtcttcagaattaaatgaacctgaattaaaattttagtatcaggccaggcatggtggctggctcatgtgtgtaatcccagcactttgggtggccaaggtgggtgggtcccttgtgcccaggagttcaggaccagcctaggcaacatagcaagacctagtctctgcaaacaaacaaacaaacaaaaaacccaaccaaccaaccaaacaacaaaaacaacaaaaattaaaaattagccaggcatggtaaaatgcacctgcagtcccagctagttgggaggctgacacaagaggatcacttgagcccaggagttttgaggttgcagtgagctatgatcacaccactgcactccagcctgggcaacagagcaagaccctgtcgctaataaaattttaaaaataagtttcagtacccaggttttgtttgctctgtgattttgaggacacaattaaatctaattccttagtttcctcatctatgatatgaagttgataatgttattatgcaaggttgctataaaaataaaagatgatttatggaaagaactagacatagtacctattgcttaggggtcattaatattattaaactctatatactggcaataagtgagaatggaagctaatcctgctattatgagttcccgaagtaccacttacctctccttccacccatatcacagtcaggattttatatttattttttgtagttatttctttgaatggctgtcttgccctctagactggaagtacatgcgggtaagaactaaaactggttttggtcaccataatgcagaactcactggctcttactagatacatttttaataaataaatgactccaatattctaactcaactactgcttagccacagacagcaagcaagggctctgctgcaaagcttagctagtgaagtccccgtgacagaaagccagccctccaagcaaaattaacttaaacgtaggtttgattaaactgcctaacaggaacaaaattcattattcaatcaaaaataaaactaaaaacaaatacaaatgaaaaaacaaagagatttagtcaacttaaagttaccacttccatattcacacacaaataaatacaaaggccaacacaagaacttgtccaaaatccaaaatcataaaattctaaattttctctgtggaaagttcctgagaggccattgatccaatcttctagcttaatagaagaaatcaaggcctgaggaaagaaaagtgctcttttaaggggtcacactgagttaattactgaagaagactccaggccacaccggcagctctcccacagggtcctcctaaatataattcagggtccagaactagaaatttggcattgcctgaagaataataagaatttccatgctggtaagatgcagtaaatatggcctccacacacaataatgtatgagtaatgtcaggaaaaaaactggtcaaaaaaatttaacaggtgagaaagatccagtttcaaagtgctatagtgactttgctccgttgtctaaatttcttatctgccttctctctcttctccattatgtggtaacctaccgtgtatctggcaacgtcataaaacaacattccaccacaggctcctagggaactttactgtaatggcctgtggcaaagtttaggggctgcggcctaacaaagctgcctgcacacacatggagattcagccaaaaaactttttaaaaaaaaaaaaaaaaaaaaaaccactatgaccgaaacccacttacaaagcagcagtcactgtagattaagctgctctcctgacccaagatggtgctagctttctgcatattgaaatcaaactgtataacaaagctgaatgaagcacccccagaaaaaaaaagggactttggaccaagcaagcatgtctacaacacgtctaaaggtttctttgtcccctcagggaaatgttataaaaaaacatgacaattgccttattcctcctcgctgcagtggtatgaatatagaaggaagagaacacaaacaggcaataactaacacacacacatgcacctagtgtgtgtaagtgagaaagtggcaggaaatgtttaatgctgaacacacccaatattataaattatggaagtagagcttctttttttcaaaaaaaaaaaaaaaaagaactccaagatgtataaagaaaaacataaacactcaaagagagtaagaagaaagtggatcagtaaatagttattaaacatactggtggttaataattagtgtaattcctaaaacaatccctagcattgtcttagttgaacaggctattaaaaataaaaagatgttggccaggcacagtggctcatgcctataatcctactattttgggaggccaagacaggaagatagtttgaggccaggagttcgagaccaacccaggcaacaaagtgagacctgcatgcctattttttttaattaaaaatttaaaaatatatgttgttgttgagataatcatatctacatgagcttgagactgtacatttgacctgcgaattaataacaataatgtactaagcaactatgtgccaagcacttccaagttgttttcatctaatctttacaaaaactgtaagaaatatttatttccagattacccatgagaaaaatgaagctcagaggagggaaggaacctgtcgaatgtcaccgcttgcccaattgtcacttattaggtggaatctgaaccacactacctggctccaaatctagcctttcctcttaccacagatgatgcattcatttattcaacatattcataccaaagacccatttgccaggtactctactagaaatggagaccgtaagaatagacttggcccctgccccaaaagcttgatgtccaatagggaaaaaaatcaaataatcacaaataaatgtgtagctcaaagaagtttgatagaaataatctctaattttcccagttgaattaagtgttttaccttagactcaaagtatcatagagtatacaatatgagatcagttatctttcagaattgttttaaaagtacattcaagcatgagtctcattagaccaaaaagaaaaataaatcagactcatgctttatcacccacagttgcaggaatacaggcatgcccctatcagaaactgctcagaagagatgataactaattatctgtgcttatttaggagaagatttgtgaatgtacacaccatctaaaatattcctttagctattattttctaccttctctctcatcctgtcagacatttatgttacagtcttagaatacacggttttctggtggaagacaactcggttgagtaacaaacaaaaagtacctggcaaatgcgtctttggtatgaatatgttgaataaatgaatacacaaagtaaaatggaaaagaaaacaaattcagaaggaaaagaatcaggaaaaaagaacaactagagaatcacagacatctggtcttagatatattagagtcttctaattcataaattaacacagtagccacgagtcaaggaagaagtgaaaagaagattaagaatgaagtgtcagccgggcagggcggctcacacctataatcccagcactttgggaggctgaggcaggcagatcacccaaggtcaggagtttgagaccagcctggccaatatggtgaaaccccgtctctactaaaaaatacaaaaattagccaggcatggtggcagatgcttgcaatcctagctactcaggaggctgaggcaggcaaatcgcttgaacccaggaggcggaggttgcagtgagctgagatcacaccatcatactccagcctgggcaacaagagcgagactccgtctcaaaaaaaaaaaaagaatgaagtgtcaggccaggcacgctggcctgtaatcctggcactttgggaggccaaggcagcatggattgcttgaggccagaagtttaagaccaacctgggcaacaaggtgaaatcccttctctacagaaaatacaaaaaattagccaggtgtggtggcgcccacctgtagtcccagctatgtgggaggctgaggcaggagaatcaccttagcctagggaggtccccagggaggtcaaggctgcagtgagctgagatcacaccactgcactccatccagcctgggtgacagcgtgagaacctatctcaaaaagaaaaagaaaaaaaagtgacatgtcaattaaacacaatcaagttcattctagctttcaaccaaagacagactgcaaaacttatgttgacagaggaacgctttaaatgtgaggctccctcagattcgaattcgagattctattacaatgataagaacaactaataagatattaactttgtgaacttctctattttttgaaacatctacttgctacattcccaacatttcctgatattctcaagtgcaacagaagcagaaccataagccaaaatgaaacaaactagcatcttttccatgttcaagctacacagaccaaagacttcatcaaccaccagagtaacttcccatgtgctgttccctcacctcctccaccagacaagcacagaagccctgaagcaagcctttagcattccaaaaaatatttttcccagacaggataatatagaagaaatacataccacactcattagagttactttattggatttgaaacatagacaaattcgactcttaacaacagaatatccacagatcacagtcagcaaccacaagtcttcaccatcaaatagatggcggcatccaagctccataaatacagatttgtactaggcccacacaggccagccacaccagtggcaggaacctgatccagagctgattcggctgtgagcacagcttcctgttcacatttttatttgttaactgtaaagaaagtttcagaagaggtaaagatctagaacagaaaggcaatattctcctgactcaaacaatgagtttgttccttgagcatgaaatgtgagtcctgcccagatcccacaagtgcatgacagaaagtggtgcagtgtccagttcctctcgtctattgaagggatacttttattaaaagaagcaggaaggaagagcaatggtgcttttaaacagagtaaaataaggcgagttccagaagcaacattatatggtatggggtacctccccaaaactccccagtgcaatgcccaaataaatatggtcacaatgggaagaaagccctcacatgggtaaaaaaattgatcacaaaaataataaacgcacaccctaaattatccttctacaattcatctccttagttgcaatcccaaaattgaatctgtaagaatacagattatacttcagtaatattttcagtgactagaattcaccaacattagccttcctaaaaactttccactaaaatcaagggcctccctggaaagagttgaccatgcaacactccaaattcacactacaccactaagagcttacacaaggaatttctccttgtatcaatgcatagtaaatttcttctccttcctatgagggtttttcagttgcacattcttctatattgtatgctttcttccatcctcacaaatgcacaaaatttaggtggcattcaaattttttctaacctttatcagaagaaaaaggagtggaaacaaaaaggagcaaacagtataattcaaaaacttcatttaatatctacttgggtaagaattcaatttgtcctaaatcttattctgactggctccctaaataaaccacagtgaaagccatctgtctgaacctgctctgcaacaggacaccccaaaagcacaacttcccctgggtagaagaaactagtgtctggctatcaagcagtgggtacgaaatgaggccttgtcaatgactgccttctcagcaccaactactctttttactccatttaagagaatagaattccaagtcacatgacaacatacacatatgcaaaaaatgctatccgattctaaaacagatacaaaaataaacaaaatacctaaacttcaatttctaacacaaaagtcaatgcatactttttttaattgccaaagaattttccataagctctaaaaggaagatgagtctgcttccttttgaaggcaagagactaagtaaaaactgatgtgacataacctttcatttttaaaaaaatcaattttaaggtgttattgttgcaatcataattcacaactgttccctgaatatgtcagacttcagaaaaagatcacaaaaattataatttgctctggcaaacaggctctcaatcaaaacaaggttccacccaccttcaaagcaaccaatagaagcccacctaccatccttcctaaaacatccaaacagagctgctctgcggcccaggcattccatactagccacaaggcaagggggcggcctgcaggcttgctctgcaggtcttgaaggcaaacaagcttggcaacacacacccagcacgactgaggttaagattatactacgagccgaagaggtaaggggaagaggacagggacagagggacccgcaaagcttcacattctatatctgctgaatgcctctccggtagtccccattcttagttctgattttacgcttcacaataccacctacatggccagctagggctgaattaaaggctctcaggaacatgcactatgaatgatgaaatgattcataaacaccttcagaagtgagaaagagcagcaaaacccatcactgtttcggtgaggccaggggaagatagcctacctgcaggggctgaatggatcatccatgactaacacgggctctggtgagtctagctggattcctgaacctttactttctgctaaaactctgcccttttctacactaacaactcaaaatggaggcacatgcagtctcagagacctcatagagctttcactgagcttgtgctatgacctaagccttcacgcagaacgcagaaacttcccctcactctgacaggactgagcatgtgctgtgaccctccctcatccacacactgtctctccacgacgcaatcaatctcaaccctgctgtttccgtaaataaagcccagccaacagactctgcagcttctccctgcacaccaagctagtgtgcagggaagtggggccttagaaaggggatccaagacagccaacagcagggaactgagcaagcccagccatggagaggcttcagttaaatgccctgctctgtcaggaactcagcaagccaagccacggaggagcgtcagttaaatgctctctgctctgtcagcacaacagcaagttttgtctttttttttttttttttaaggtaaatggtgattttaaaaagcaagatcaccaagaaatagaatcaaaagacagatatgaatgactacacacaagatcaactaatagaaatactgcaacacatttaaaaacatagtagtagctacttaagagaagcaacttcacaaatttctttttgaaactctaaacattttgaaaaagaccaaacaatccgggtaaagttatggagtgcttggccttgtcacacaggtacagacacagtgtagatggtattgtgagcagggtagctaaagaaaactgtattttctgcaaacagcttaatcttccttagataagaaactaaaaataataaataaaacattccccaaataataaattaaaacatttcctaaagtaatactagcccaatcaagtctagcttgaagaatctaattctaacaattagaaagacaggaaggttcaagattcaacatcgtgccacaaacacatgaacatccaaaaatctcatttgaggtcctgattcaaaatactaaggcagatccatataagaaatcctagctttggatgtgcaggcttagtttccacttacaaactaagaggtgattctatagattattaatcagttacaaaaagaaaaagaaatggaagaccatgaacctcgccaaaattataaaggacaagatagggcaggaaagggcagtgccaattctgtttcccagaaatgtaatggaatgtcaggaaattaaagcctgttgaaaagaacacacagtgtcctcaagattcctacagtgaatgcagaatcaattccatttccatagcactcccgtttatgctatgaaataaactaaattctgaaactatgattcaataaactcttatcctgccgataatgtaatttagaaaatacaagaaatgccaagtacacttaaatacgttttcctttgacctaacacatgaaacaagtatctacaggctggaagaacattttcccttattggtatgtgagacaacatattcccaaaactgctgttactaccaacagtctagagaaaaatactttctaaacacaaaagcaatggaattagaacctagcagccaaataatatgaatatgagcagcaaagaatttcctcccaaaagtgtatatattaaaaaaaaacaaactatctaaccctttcatatggaaaatgtttacttgaagaaatcaacacaaaataatatgtaataaattcatcagtctctgaaagcccatgaaactgttacatagagcacactataaaaacggttactgtaacagcaagttaagaaatgtggattctaattttggtctcattagatgccctgagttaccaaaatccaatggccttcccctgtgataatggattccaatggtggcgccagcctttgtggatatcctcttcattgtctttcctggtgctggcatctcacagttggcttcacatgccatgccaccaagacagacagccctttctcttgttacccctcaggggcagcgtaccccagcggccacaccccagatctcctctccttcacactctctcccgtggaaaagtcacccacactaccaccatgccagccagctccactctgaagacacttccttcctggcagcagctcagaaatgcaggagcccccggaatcctctcactgtacctctctggggaactgcacctctcttattagattctaagtccttcagggacaaggacactacctaaatcatctttattggaaccacccaactctcctattttgtacctcaaagaactctatctgaagcagtggaaagggcacagtatcactcatatagtatggctggccaaaattacataacctagatctaatcgtggggaaacgtcagacaaactcaaactgaagaacacttgacaaaactggcttctaactcttcaaaaaggtcgatgtcataaaaaatctttaaaaaaggtgaggaaacatgttgtgaaaacaaagagagacaagggatattaaagagacacaacaattaaatgaggcttatgatcatggggaaaattactatgaaggccgttgttgaaaaaactggcaaaatctgaatatgaactatattggactatatcatattgtattaatgttaccttttctgattttgataatcataccatagttatgtaagataattttcttgttcttgggaatacacactaaagtattcaggggaaagggtgtgatgtctatatttcattcccaaattgttcaggaaaggaaaatacaggttgagttatcctaatcccaaaatcccaaaccaaaaatgttccaaaatctgcaactttctgagcaccaacatgatgctcaaaggaaatactggaacgttttagatttttggattaaggatatagaataagcaaatattccaaaattccccctcccccaccaaaacatgaaatccaaaacactcttctaaccccaagcgtttcaggtaagggacagattcaacctgtaccacagagagagtcagacagcaaagatggtaaacacagacagcaatacagcaaaaaaagagatagaggttatctcataaagtgtatatttctaataattttgtgcatgaaacaaggttttgattgggttttgattgtgatctgtcacaggaggtcaggagtggaattttccacttgtggcatcacttcggtgctcaaagcattctggattttgaagcattttagatttcgaattttcagattagagatgctcaacctataatagagcaaacctataataaagtttaaaaggtaataaaataaaataaatataaagcaaatatggcaaaatactaacaactggtgaattgagtaaaagatatatggaggttctttcttgtactagtctcataactcctctttgaattatgaatataaaattccaaacagaaaaattttaaatatattaaacaaacagaaaatatatccaccagcctccacaaccatcagttctcccttcttttttttttttttttttttgagatggagtctcgctctgttgcacaggctggagtgcagtggtgcaatctcagctcactgcaagctccgggtcctaggttcacgccattctcctgcctcagtctcccgagtagctgggactacaggtgcccgccactacacccaactaaattttttaattttttttttttttttagcagagacagggtttcaccgtgttagccaggatggtctcaatctccagacctcgtgatcctcccgcctcggcctcccaaactgctgggattacaggcgtgagccaccacgcccggccacaaccatcagctctcatggcatctggagagctgacacaaggggcaatgaatgacctgcctccctgcctgcagtcatggtgctctcacccccaaacagaagtcaattaacacccagctccaaactcactccaatctcaagaatataggatcagtcctcctcctcctcctcctggtcagagaatctcaaggagtcttgaaaccgagcagttccataattaggttagccactaggtcacattcaaccacaaattccaattttagaaatggggctctgattccatggagcaagccttgctttacactgagttcaccctggtaccctactcagtgcttaagggcatcccagagaggggccttgttttctctcctagttctcttgaacacgggctgcctgtgtactgatgctgactacccacctggacctcactcctgccaccacattttctagcccatcgtttgccagcctgcagggatgtacatacaatctgcaacctggcaccctcgtatttccatctgttgccaactgccaaggccttcccagaagtcctgtgatccccatgtacatctataatctctggatcccagacatccttctctcctcctattaatcccaagtgaacaacaggtgtaggattagcacttctgaatagactaaatgagagctgagtgggagagaagaatacacaattcaaatcaattttttctaaaattaaaaaaaccactttgtccactataatacttaaatttgtagtgagtagattatgtacctctatcaaaggtaagtaaaagctgtaacatgaaaattgcctaagttttatcttaaagaatttcctacttcccagaaacaaaaaatgtctacaacgttgtattcattaacaagaaactttaaagccaaaatggggaggcggggcggggaggggaagcaacactcaggaaattctagagaaaaagtttggaagagatattctaattagtactaacttcacatcaagagaggagaagtattcagaagcagtttatttaaatttcatttactaattgccccgcatatctagacatggaactgagttttcgttttctttttttttttttttttttttttgagacggagtctcgctctgtcgcccaggccggactgcggactgcagtggcgcaatctcggctcactgcaagctccgcttcccgggttcacgccattctcctgcctcagcctcccgagtagctgggactacaggcgcccgccaccgcgcccggctaattttttgtatttttagtagagacggggtttcaccttgttagccaggatggtcccgatctcctgacctcatgatccacccgcctcggcctcccaaagtgctgggattacaggcgtgagccaccgcgcccggcctgaactgaactgagttttctatctatctatctatctatctatctatctatctatctatctatctatctatctatctatctaactttctatctatctgtccatctttctatctatctgtccatccatccatccatccatccatccaggaagcttgctgatttacctattagctttaacaatttggatgggcccgggggctcacaaatataatgagaggccgaagtggtgggtgacttgaggtcaggagtttgagaccagcctggccaatggggtgaaacccagcttctactaaaaatacaaaaataagtcaggcgtgatggcatgcacctgtagtcccagctactcagtagtctgaagtgggaggatcacttgagcctgggaggcagaagctgtagtgaggccagactgcaccactgcactccagcctgggcaacagagcgagactccacctcaacaaaaaaaaaaaacacaacacaaaacaaaaccaacaccaacaataaaactaattttttcacaagttttctcagatttcctatggtgaaaattatactttattaataaatgttcattttttcatttccaaccctcacatattttcttcttcaagtcttaatggatattgaaatcctgctattgtttctggtttcagaggaaaaagtttccacactctgcctttaactatggtgcttgctgtaagtttatggtaagtattctgttagattaaggaaattcattctacaattaattttccttttctaagagtcccctccccaattattacagagcgttgaattttatcaagtgctttttctacattaagatgattgcatgggtacaaaaaaagaatgaatgaataaggtctagtatttgactgtgaaacagggtgaccatagtcaataataatccaattgtacattttaaaataactaaaatagtataattggattgtttttaacacaaaggataaatgcttgagggggtggacaacccattttaccatgatgtgtctataatgcattgtatgcctgtatcaaaacatctcatgtaccacatacatacgctatgtatccacaaaaattaaaaattaagaaaaagatgattgtctatgttttcttcttctatatgtcgaagaggcaacatatgctaacagataaattattaaggcattcttatattctataaatttggacatgcatatttaccttgctagactccgtttgttaacatttcatttaaacattttacattcatgttcataagattgaacctataaattttatttttttaacctggttttataataaaggttttattagcttcataaaatgactcaggggacccataacaactttctctgttctctggaacactggtagaattcacctgtaaagcatgagtctgattcatttttctttttctcttttatttggggggggtccggggaggggggagacagagtttcacttgttacccaggctggagtgcaatggcacaatcttggatcactgcaacctccacctcctgggttcaatagattctcctgcctcagcctcccaagtagctgggattacaggtgtgcaccaccatgcctagctaatattattatttttaatttttttttgagacagaattttgctcttgttgcccaggctggagtacaatggcacaatctcggctcactgcaacctctgcctcctgggttcaagcaattctcctgcctcagcctcccgagtagctggggttacaggtgcacgccaccccacctagctaaatttttgtattattagtagagacggggtttcccatgttggccagactggtcttgaactcctgacctcgggtgatccacctgccttggcctcccaaagtggtgggattacaggcataagccactgcccctggccctttttttttgtatttttagtagagacagggtttcaccatattgatcaagctggtctcaaactcctgacctcaagtgatccaccgcctcagcctcccaatgtgctgggattacaggcatgaaccaccaaacccagcctgatttatttttcttttcggtctaatgagattaaaaaaattatccaatgcaaattataaaaactgcctttaaagggagaaggtatgcagtttttacctatttcctctttcttccaggcggaaatctggatgtaatggccatcactacattgccaaccttgaaacaagagaacagtggcagacaaggtagtaaagggtggacccctgatgactgtgaggtcctagtctaggagtgcttcctttcaaactctgcttacatgagagagaaatgaaagtgatattttatttaagccttttacacagtctctttctgaagcttccagtatttgaagttctcgggtgtgtcttgctgtttgtctcatctgaccacagttaatggtacatggtttcttccgatatttctgacggtgagcttggcattcaaggatattttatctgtggggatcctacaggatcttggatgagggtgtctcccattaaaaaacattttacatatgcttctgccaggtatcttgaagggtttactggcatgagaccactttttatattgccttcttatcctagagttctcatattctgaagggcccagaatcccaaccctaaacaggtgggtttccctgttactcccctctaggttggaaaatgttaacaaactcaatccagcctcaccatgagctactgaaagatcagcttactgctttagttttcagtttctcttaattctttggagctcagctccgcagttaaaagttttgttatgtgttattccattactccaggtaacattcctagatgttatctgacaaagggtttttgaaatgatcaaagggtttttgaaatgatcaaatcaaatgatcaaatgaaaaacaggcttttgtcctgttttattaaagttatcttaacttcagtaggctttgttttccaaaaatacatgtactctcaaccatctccaatattttccatctcaggtaaatgtttctgagaattcaaatgtgatggcagataaaagcaaacaggaaaaaatttgtatccagctctagctgctcatcttcaaaagctacacaaagaccacgagctgtggtgagtggaaaagggaactgttactcaaatgcaagtaaattttagaatgtctcaaattcaaattagttgaaatacaggtgttttagattgttaacttttccacttaagtataaagatttatgttgaggaaaaaaatggtcccaaggtcacagagcaaagtgacagaaaattaagaaataaagacattaaaaataatgaaataaggtttcttaatgttaaagaagaatgttacacataaggaaaagggaataaactagcagaaattctgtagtactggattgaacttggagaatttcacatgaacttatgaatatacacacataaatacaaaactataggtgcaagtgtgtgcattatatatgcgatagatacaaacacacgcactccctagctctgtttctcagaaggtcagagagcagcaacacaaagtaatgagcacacttagcaccaaatctaggctttaaaatatcattctccaaacactgggacaatctgacctcaaaatgaataacaacagcagcaggttataaacaattaaataaaataggaggccattattccgctaaataaatgaataaatcgaaagtttgatgaagatgagatctacacagtcacaaagcaacctcccacaaaatggttattaattaaaaagggaaaaagagacaccgtacaatggcaaaacctggcagacatcacgtccagcaactggtcaaagtgaacattaccagcaactggacaaataagaattgtatactgacaggatacagaagaaaagaacacaaaatttctgtgatacacgatctaactctaataataaggaaacaccataaatgcaaactgagggacagctgggcacagtggcatacaccagtagtcccagctactagggaggctgaggcaggaggatcacttgagcccgggaggatcactgaggggggagggaggatcacttaatctaggctgcagtgcacttaaaccgtacctacgaatagccacctcactctagcctgggcaacataataatactccattgctatttaaaaaaataataacaataacgcaaactgagggacaggatacaaaataattggcctattctcttccaaggtcatgaagccaagaagcaactgaaaaactgttccagatttagggagactaaacaaatatgacaactaaatccataatgccaaacaagatccttctgttgtaggtttttattaggaacaccggcaaaatttgaatagggcctgagaataccatggtaataatattttcattgttaatttcctgattttgagggctgtattgtggttatgtaagaaaatgctcatgttcataggaactacacaaaatactggagtatgaaagagcttcagggtgacaacatactttcaaatgattcagttaataaaggtcttctactctacttacaaggaactattctgttttaaaacaaaataaaatgcacacagtattctaactaccacactaactcttaactcttgctattattaacattattgcagttgtcagtctaggagagagaaagtatagtccctgtaaatgcctcaagtttatgactgctcctgaacataatgatagtaacatataagcctcaacactgctgcaaaactacacttctaggaagaggaagaggagaagggagaaaaggatgagaagaggtgggagaaaagcggacagcctgcaggagatttagccgggcatggtggcccctgcctgtaatcccagcactttgggaggctgaggagggcagatcacgaggtcaagagatggagaccatcctggccaacatggtgaaaccccctctctactaaaaatacaaaaattagctgggagtggtggcgggtgcctgtagtcccagctacttgggaggctgaggcaggagaattgcttgaacccgggaggtggaggttgcagtgagccgagatcacaccactgcactccagcctggcgatagagcgagactccatctcaaaaaaaaaaaaaaaaatcagatatttttcaatcttgtctctaaaagaaaatttgtaattacttctgcaattcccaagaagaaacaaaaaatctgacagtttacagaagttttctgcagggtagctttcatcatccccatcttactgatggagaaacagagtccagaaagtgcatgctttacccatggacacgaggattaagtagcagcacgggactagaacccaggccacccagatccaagaggtgagatcttaccagatggctggaaggatcaagccgtcagattaaatggctagaaggtgttagacaaatgaaaaaagcaactaaggacagtaaagagaggcatataaccacgtccctatggtcatctctttttgtaagctaagaccaatctattttatattttagtttaaccaccgacgctggtgttttagccaaatgcacctaaggcctcctaactggctttatttatgaagacctctgagctgaaatttattgactttattaagtttcttggcagactctggatcagacccttcaaacaaacagagaacacaatgacattacttgcagagtatgctcaccacagaagtaaatctggatgaatcttgttcacatgtacaaaactgaacactccctgagtgcagaaatgtcaaaaacaaactccaaaagcaaagcccaattacctcagggttcaaagtcaggtcaacattagatttaaggctctctcatttttcacaatctcttagtagtttgtattctacttgggcaaaaaattatgccccctaaatttttgcccaattaagttttgttcccgctgagtggagcggctcatacctgtactcccagcactttgggaagctgaggagggaggatcgctgaagcccaggatttagagaccagcctggggaacatagtgagacctcaactagacaaaaaatttaaaaaatgagccagggatgatggcgcacacctgcagtcccagctacttgggaggatgaggcaggaggatcacctgagccaggtaagttgaggctgtggtgagccctgatcacgccactacactccagctgaggcaatagagtgtgaccctgtctcaaaacaaacaaaaaaataagttttgttacttaaatttcatggctagcactaatacagagtcataatcccttatctaaaatccttaggatgagaggtttaccagaattcagaatttttattttagcactacagcaaatatatcacagcatgtaacaccccagcagtgttcatgtaataatccatattccatcatattagtatttttagagtaaaacttacacaaactcacacaaagtgaactgaattaagaatataaatagcctcctatcagttcaggttaggttcagccatcaaatacattttggcaccaaccttggcataaaatttgttagatcttcagaactttcatatttcagaatttaagataagagagtatggatctatattactatagatgctttatcagtattaataagtattctagattaaaaagaatgaaatataagtttatacctaataataacaaagtaattccatgccaattaccaagaaatccattcttcccaaatgttaaaggcaacaaattctagagtacagaacagtcagtcagtttcccactatcacacattattagttcaataagtggtaatccatcaggaacaaaaaaaatcagatccctgacaagatacaacattcagaaatataatgaccaggttagagaaaaaaataaaatgaagctgtacactgaaatttaaaaaggatctatgcaaataaatgtgaaaaaaattccaaaatttcagtgctgttcaatatgctaacaaagtatggaaaattacataaatcaacgtataactacttttggaaaatcagctctgagaaataaacagttccatcttaaggttcactttcaactgctcacttaaagttcctgcattatttaaggagacaacagtcatgaaagtctgcagtcatggaatcactattccttaaatttccagtggactttcctatatgcagtattgcccaggaccattacacaatcagaagaactttgacatttcctttctacattaacttacatacttacctaaataactcagggcactaagagtcagcatacagtacactatgtagccacgactacttactagtcctactcattaaaactgggggaaaactatataggaaaccagcttatcatacagcctcctccctcacaaacgtgaaacaaagacagaaacagaggtaaattctgcaagggtatgcaccctgggaattctaagaactgggctgtgcacagccagtttttctacactctgttaaattagatgcatttttggatcatttgagcagctgtgggaactatagccctaaccccaaacttcagagatataaggaaatgttcgggataacaccagcaagccaaggcagtaggctgcattagctccactgctgcaaatgtctacaacggcctttacacttcaactgtgagaagtttgagatttgcctcaaagtttacttataaatgggcacttaagtatttgttcagttcaagtcatccaacactactcaagcacttaaaacacacaaagcagaaggtggacatagggaacacaagtgtagaagaaaatcagtggtgactagaaaggtcactaagggaagtgattcaggatgcagatcctgtaagtgtgctgctatcatcatgtctctgtgttccttattgcatccatattttaaaacaaacccgatgggatgtattgccctgaaagactgtcagcagcacacaatgaaaaataagaaaagaacttgagtgagtgcctggtttacaaaggtaagttacatattacttttaataagcattcagcaaaacatgtataactaacatttgtaaaaaataattttggttagttgttacaaacctgagagttgaagagttaaaagacaaaagctactttagttaattaatataacttgtgcaacaggaaaactatcaagtgattaaataagcacaatatcactaaaataacatccaattcctttgtatctagagagaaatccaagttcaagcattttacaatttacctgggcaacaggaagacatgagaaggtagccaataaatgcatatgtaaaataaacatttcaaaatatcagatgcttaagaaatattaccactgaccagcttctttatcattggaacacggcatacttttgaaaaaacaaacaaacaaactcaaccatcatagttttctttcttttccttttttttttctttttttctcgagatggagtcttgctctgttgcccaggctgaagtgcagtggggcaatctcggcttactgcaacctccgcctcccgggttaaagcaattctcctgcctcagcctccagagaagctgggattaaaggtgtgtgccaccatgcccagctaatttttgtatttttagtagaaatagggtttcaccacgttggccaggctggtcttaaactcctgacctcacgatccgcccgccttggcctccaaagtgctgggattacaggcgtgacccacctacacctggccaagcatcacagttttctaaaggagaaaaggtactctttgatgagcattatattactatccatacatcaagcactatctagaatctagcttctgatgctgtctagaaaatagcatccaatattgagaggaagagagggagacagacagacagatacactaatgcgagccccaagagagctgtgggcagcttcataaaaccacaacaaaaaacacgttcccttctacccctacgttgactactcaacaacattctaagttttacatacggtttctgaaagtcctctagaaaaatgttctcaataaaatgatacccattttgcctttacacttaatgtagttcttttgctaacttctttgagccaagtattatttattatttatttatttatttattttttattcttttaaaagacagggtgtccctctgtcgcccaggctggagagtgcagtggtgccaacgcagctcactacagccttgacttcccaggctcaagcaatcctcctgcctcagcttcctgagtacctgggaccacaggtgcagcccaccacgtccagttaatttttattttatattttgttgagagaagaggtctcaccattttgcctagctaggctggtctcaaactcctgggctcaagcgctcaagcaatcctcccactgtggcctcctaaggttctaggattacaggcatgagccactgcacctggccggggatgttttatttccttctaaatcttcacatgtataaacatgtcttgggtgtccagagcatatattacttgatcagtggctaacatcctgtttttaaaatccttaataaaatatgcagtcacatgatcaatacagggcaagtatgaatatatacactcataaaaattcttccacgtgctacattaaagtagcatctatgacagacataaaaattgttaaattactctgaccctattgcttctcattttaaaaaaatagtaattcaaactgttacatagatcttaccaagatgttttgagaacttgatgtgtctgactcatactagtagtcttactaaagatatttcagtgtgtgttcctggagttttattaccaagagtgaacaaaacaaatgagtaaccaacaaactttccaaaattacttagtctttttcaatatggtattatggaaggcttgacagaatgtgaatcagggaaataatctaccaattcttaatacttaattcaaaatacagataaactaaaagtatatctttatcccaccttctttcaacccaaattttctcatttttctttttctgaataaaagtaaagagcaaacaaaaagccactttagatgtcaaagacattaattacaactcctcccaaagaagtttactgaaggactctggagtcattttttttaagtatgttactagtgtatgtccagaagcataaactacacacacacacacatacacacacacacaaatgagaaaaggaaaagagttctcaatgaatggacacaagtgactcacttaccttgtctcagggttatatcctaatatgtagaaaaatgaatccactcgggctttaaactctctagcagcaaatatgtcagaaaaatgggagatgttacacttccctctgggaaaaagagaaaaaaataattagtaataccctcaactgcttttgctaaccaaaactggagggggaagggtggaggaagcactgaactaagtccatgtgcatggagaatcggctacaaacaccacactttatttcacctattcagctgtttcatgactgcttcactgtacacctgtgtaatctgactgcttttatatcaccattttactaataaagtaaaattaattaaaacaacaaagataaactggagacaggactatgagaaagaatattaaacaaagtagaaatggagaaaaattaaaaccattgtgaatataagaaaaactcagtttaaagcctttctaaatcataaaaaaaaatgagcctttcttcctactatattatgataggcagaaagtttaactgtttaaagctaaaatgtggaatatttgacatgtctttggaatacagcttctggccaataaacatttttcttctcctgcaatgtgcaacaaataaagttacttggaaattaaaacctagagaaattttaacttttttgcataaacatgggccccaatatacaaggagttttcaaattttggggtaactttaaatggctataaggttagaaatcactttcccatagaaatactaaaataaagtggagtaaagttttcaggttcatttaccacctaaagttaaaccaacctgtagttgaaaaccctacaatacttactccaaaacggcttaagcaatgtttccatgcaccaagtatcaacgtaaatgccagaagcattatatcacgtggtgaggcctaacttccaaatccaaacacacacacgcacacatacactcactccaggattcccaaagaggcaggggaggcttaagaactctaactccctcctggtcactttaatgccaagtggaagccaaaggctacagtgaggttagatggaaatggaggaccaaaagttcccatttcatatcaaaagccgtgcagcatacttccaggacgtggcctcccactgcttgagcaggctatctgttgtgataagaactccatgagtatgcacggtaacaacatacacaccagctaatggccacagtgttaggaagagaagctggctgaggggttatcagcgtgggttcattcattcacttcctaccaagaaattaaaaagcaaggttcttctttaccttaagggcttaagtacctgtaaccaaagcagggtcagccaggcacagtgacttcacacctgtaatcccagcactttgggaggctacgacaggaggattatttgaggccaggaattcaagaaaaacttgggcaacattagttgagaccccatctcaccacacctggttaattttaaaattttttgtagatgggagtctcactaggttgcccaggctggtctcaaactcctggcttcaagtgatcctcctgccctggcctcccaaagcactgggattataggtgtgaaccactgcacccagcccccatctccattttttaaattaaataacaatgctgttgatataaagtccctttggcaactatagattagaaagtatctatagttctatagaatagaagctacagaatagaaagtattccagggttactgagcacttcaaacaacactgataaaactgagaactgaatttaaaattttatttgatcttaacaaataaattatttgatcttatgtaaatctaaatagctacgtatggctactagctaccatagtgaacaacacagatttataagacatttccatcacagcagaaagttctattagaagtgctatagtattcatacctactatttgtagatagtaagatccaattcaaggaaaaatacagactaagcatcaacttcccaggcccagaactgcctcttctagtatttaactagaactaaaataagcttctgggaaagaaaatgcaggtatgatcttttttacaaatgaacaactagctcactttgaaaccactcatccatacaaggtgatttaatccccgaaagccagaagaaataggttcctttagcagtaaaatagagataacacctactgcacttataaagacaaagcctacaaaactctactacacaatgctatgtaaagtaagttattcctattattgtacattactaaaggaaattgattcttcttttattattgttcgttatttcactcttaaactggagtaattaatgtatcaattaaaggtaaagaaaacccttaactctaaacacaaccactagaaatcaggtatgtttagggcagggtttatcaatcttggcactaatgacagtttgtactaaataattatttattgtcagaggctgtcctgtacattgtaggatatttaagagcatccttggcctctacctagaagcacccatacacatttcttcctcacaacaaaaaatgtctcaagacttgccaaatgtctcctgtgagggaagaaactactggcttacagaaagccaaaagcaacaggaatagaagcatttcatctgataaatgattatgaagttgtcgtaaatgggatttttctctaccatcaagccctttctctatttgattctgtttgtatatgtgaaaggtactgacatttaaacatttcacttttttatcctttcttatgcttctaattgcactgtacctctaatacaatgtggaaagagtgaacatccttggctagttcctgatgtcagtggaaatgtctctcatgtgttcctattaaatatgacactagctttacagacaatcaaaccataatcatagtattggaaataattgactggtttcctcctttagagttaatagtttgatatatgctatcaatagagtgaaaacctgaaccaaccttgcattcctggaataaatcccagctggtcataatgtattttttaaacaaggtattaaatttttaaaaaacaaaaagaatttggttaactacatctaagttttcttcctcccaaatttgtttttatctttattatttccttctttgtacatttttattgttgctattattcatgaaaggtttattcataatagcctaggaacaacccaaatgtgcagcaacagggaaataaacaaatcgtatatatgtacaataaaatactacacaaagatctagtgatacataaaataccatggacaaatctcaaaaattaaatgttgagtataagaagccagacacaaaaacagtatacactgcatgattccacttatatgagctttagaagaggaaaaaataatttatagtgagagaaacctgaacagttggtgattttgggtgggaagtttttagagggaaggatcttgagggaacttcctgagatgaggggaatatgccaggtcttgtttagggtcaaacacatttctgaaaatgtacacttaaaatctacattgtactgtatattaaaaaactactagaggaaagtaaaacaatgagaatcattaccatatagctgtagccatatggtaatgattcataatcttgccagttagccagccctcaaacactgagtattgagcagagctgaagaaagggtttccataaccaggtaaggccaccaggattggctctgactgggtggcacccatttgaagtattttacaaatcaactcgtgatgaacagtgtttacctttaaaaatgtgtgtatatgtgtgcagaagtatgggtatgattttaagtattcagtgttttttatcagagcactcttctcaccatgatctctgtcaaaagtaggacattatttgacattgtttacagaatagatgaggagggaccgttaagagaaaattgccatcacatccaccttgctgaaataaccagttccagagcctcctaaagtcttgtatactctgtatctaaagcaatgcttcactgttaacagaaatatgactaaagacagggaagccccatgtgttagcatcctttcattcaacagtaaaaaaggcgtcccggaaatgactcatttcagtaatccttccgagtggggcgggccccagagagttttacacctggggcatcatccgaagggtcttctggctaccaagaggaggtggctatatgaaaaggatgaagaagagacaagagagcccctcttaagtaaggagacaatacaaatgaaaactgtggcctagaaattcactctcttaaaattaccaataactgggaaggtcttcccgtatccccaggcatgcgcaaactccaaagactcaggacaacgtgcacgagcacacacagaatgtttacagtagcaaatctgttgaaagctattattatcattattaagatggagtcttaagaataaaaaattattaataataaaaaataaattattaataaaaaattcttttttttttttttttgagacagagtctcactctgacacccagactggagtgcaatggcgtgatctcgactcactgcaacctccgcctcccgggttcaagcaattctcctgcttcagcctcccgagtagctgggattacagacgcgtgccaccacacccggctaactttttatatttttagtagagacgaggtttcactgtgttggccaggattgtcttgatctcctgacctcgtgatctgcctgcctcagcctcccaaagtgctgggattacaggtgcaagctaccatacccagtctttttttttttttttttttttttttgagatagggtctccctctgtcacttgggctgaagtgcagcggtttgatctcagctcactgaagactcaacttcccaggctcacgtgattcttccagctcagccttcccggtagctgggactacaggtgcgtgccaccacacccaacaattttttgtagagctggggtttcaccatactgcccaggctggtctcagactcctgggctcaagcaatctgcccagcttggcctctcaaaatgttgggactacaggtgtgggccaccatgcctggacaaaaataaataaataaaaataaaaataaataaaaatatatatatataattttagtttgtacttccccttttgcccaggagttgcttaacaggaagttttaaatttccaggtgaaagggtcttctgttctttgttttccttagtaaactacaattttattgcattttaatcggaatgattttttttctgtgatctaatatatgaccaatttttgagaaggtggcaagatacacaaatcaatgtgtattctttattattacaggatagagttcaaagtatgtctgtaggccaggtgtggtggcttacacctgtaattccagcactttgggaggtcgaggtgggcagatcacaagaggtcaggagttcaagaccagcctggccaacatagtgaaaccttgtctctactaaaaatacaaagattagctgtgcatggtggtgggcgtctgtaatgccagctactttggaggctgaggcaggagaatcgtttgaacctgggaagcagaggttgcagtgagccaagatggcgccactacaaggatgggcgacagagcaagacttcgtctcaaaacaaaacaaaaaaaaaaaacaaaaaaaattaagattattagcttagggggaaaaagtccaaaactgtacaaaatctgtaacaaggaagatttttaaacactcctgaaagacaaaaaaggggatatgaacaatggtaaaacatccatgttcttagataggaaaactcaaactggcatttctccacagattaattaataaatccaatacaatcccagtacaaataccaacaagctttttttttaaaaaaaaaaaaacaaaatattaagcttcacatggaaaaacaaataactaaaaaagaggggaacatatattaaaacatactataaagcctctgtaattcagagtgtagtgctgacacatagacaatagaacaacaaaacaaaaaagcaagtacaaaatacatatggaaagcaagacaatggtgacatctcaaaccactacaatcaacataggtattttaataagtaatcctagaacaactgggtagaattattttttaaatatggtgtagggaaaggctttctaactatgactcaaaatccagaggcaataaaagactgataaatttgattagataaaaatacattttacacaataaaaaatacaacaaataaaattaaatgaaaactgacaaaagtgggagaaaaatatttgcaacaattgccatgtaccacggttgtataaagcactttttaaaagtaaaacaaaaagaaaacccaatagaaaatacataaacagacaatttacaaaaaagagacaaaaatatccttcaaacatatgaaaaaatgttcaaactcattgttagtgaaataaaataaaaacatggagataacacttctcacctatcagacttgtaaaaatttaaaaagacaaaacattctattaggaaaacaggctgcttcatacttatcagaaggaacacaaattggtacatgccagctgaagggaaatttggtaatatgtaacaaaccgcataggcataaacctttcaacccagcaatcccactattataaatgcaccctgacgttcccaatgataagaaaatatatatgcacaaagatattcattgcagcatcatttataattgcaaaatcctaggaacaacgtaaatgctcatgcacaagagagcagttatatcaactacagtatatcaacataaggaagtaaaagagaatgagaaagtcctctatgaactgataagagcaattcccacaatatactgtcatcaagtgaaaagagcaaagtacaaaagaccatctacagtattctacccttcatataagaaagacggggttttaagaaaagaggcatgtatctgctgatttgtgaaaagaaaatgctggaaggatgatccagcaagtaaaatgatcagtaacctagagcagcaaggtgggagcgaagagggaaagaagtagaggatgggaacatggtggcagggttgaagagtatcttcttataaccctgactcttagaaccacagcaatagtccacatgctctcacacacccataaaataaacagtccaggtcaacaaggagaaaccaaaaataggatgtaaacagcaacaaatgaacctaaatgtattacaaataaacaaatgcacataaggaggtaagaaagaacagaactgacctaagtaagaggaaaagcagtatttggcactataagaccgaaaacaaaaagagtcaataaacgggtttctcaccaagacgtgggttacaaattctgaaactaagttgtatgcatttgagaattaaacaaaaacaagtaagtatattttagacaatgagaactgagtttcttctgtgttggagaaagcagttataaataacggaaagtgaagaataaaatcttcaggccaggcccagtggctcacgcctgtaatcccagcacctcgggaggctgaggcgggtggatccggaggtcaggagctcaagaccaacctggccaagatggtgaaaccccatctctactaaaaatacaaaaaaattggccaggtgtgggggtgggtgcctgtaatctcagccactcgggaggctgaagcagagaattgcatgaacccaggaggcagaggttgcagtgagctgagatcacgccactgcactccagcctgggcaacagagcaagactctgtctcaaaaaaaataaaataaaatcttctagtgttggactggaattgaaattaatataaccttacaagtctggagttaggggaagttaataggcacaggctggtatacatacacatcctagctctgcctgctaactggatctagaaacaatgatatccagtagtaacacacatgcctaatacccagatcttggtttctaaacactgctctccactaaagggaaccccggttcctcacagaatggctaattccagcgctggaagttagaaaataaaaaacgagcctgagaacatcttgtggagctagaaataagaaagtgctcaaaaaaatacagaagtttgctgataaagtgcaggggccaatctgaagtagctcctaatggccaaagctgggcaataaaacaaaaaataataaattataacaaaacaaaataaatatccgtaagttcatgctgatgtaaatactcaaatagatttatgggataaaagggagatttctttactacagtggaattccaattaataagtgtagaagaaaagaaaaaaaaatgaaaaaccaccataggcaagcttcacaaaagtaacttttacaggtgaaatccactgataggtgcttaaaatcactgggtgaaaatttaaggagataaatgatttgcagagtgtcaaagtatctcccaggttaattaagcacaggggaaaatctgctttacagtgaagaaacctggcagaagccacattcatcaagtggacaaggtcaatgtcaccagtaattagacattatcaacctcatgaagcccatgataagatgcactcagaaacatgtaatttctgtggttcttgcccaaaatgcctaacttcagaaaagccaaattgagggacatttgacaaaacaattgatcaataatatttacaataccaaggaaggtcatgaatggtaaggaaagactggagaaccattacacactgcaggagactaaggagaaataattaaatgcaatgtgggatcccatataagatcctagaacaacaacgaggacattgctgaaaatcaaagagaatctttagtctaatgctattgtatcaatgttaattccctggttctgataactgtactatagttgtagaagaagttcacattgtgggaggttaggggagggatatattgaacctgagtacttgtaactttgctgtgtgtctaaaaatagctccaaataaaagaaagtttttcaaatactatgaagtactcaagggcagacggaatatcttactgggtaggttcccatcaccaaatatagagcccttcatctactagtagattaataaaaagtgttaaatgatgaatgaataaataaagcaattgacaggttatgatgtctaatgaagtactaagcatgtatagacaaaacaataaaaatgctgtaggtcaaagttatttcacatataaaaacaactgtagattaaagccagataaggattcttaaactgcaaaactaagagctctgagacaccatgaaactccttacagaacttgcaggagctaaagggtgttttttgttgttgttgttgttgttgttttttgttttttttgagacagagtctcgctctgtcacccaggctggagtgcagtggcacgatcttggctcactgcaacctctgcctcccaggttaaagcgattctcctgcctcagtctccctagtacctgggactacaggcaccagccaccacactcggctaattttttgtatttttagtagagacggggttttgccatgttggccaggctggtcttgaactcctgacctcaggtgatctgcccaccttggcctcccaaagtgctgggattacaggcgtgagccaccgtgcccggccactaaaggatttttaaatgttttaaggaatggttgggaaactgtccacagatgtgactaatctgtttcaagccctaaacatatacatgaacctagttgctcataacaaagtagggagataaattaatttataatgaaaagaaacagactggaagcctcaaacagctaatttagggctccttggccctggtcttccagaaaattcatcctaaagcatcttcctataataggagcccctgggtaaaatgacagcctataacctgacctgcagtaggatatttctttccccaagtgactcctccaaataggaagcaggtaatcagaaagctggaaaacagtcctcagtcagcaagacacttacgatctcctgtgctgccctccacaatcaatactggagaatgcactgatgcgagtacacaataaacccaagaatgttccccaggtcacatgtcctcagtccaatcacaaagcaatcactccagatccttggatccttaataaaacattatccttaggggagaaaaagtagcacagaaaacaaattacaagttacaagtttatctgctcgttcttggagtgtgttgagatagctccctaagctgaactcttctccatatacctgaaggaatctaaatatctaatccctcctccgccaacaggccacagagaaatagtaaaataagtgtatgctgagtgattacaccatcattaactcagtacaaaattacacttaatttcactttttcttttcttccacttatacttttaagaactcagcagaaattcaatgagctatggagtgtactacacatgttactagggcctgagatgctctttgagggactttcacactccttaccatactggatgtggaaccagatgtgtgtgtttggttcaggattctgtcattagtcatgtgaccttgaacaagtttgtcaaaggttagctcaaacgttaaaaaacgtgacactggccacaaggctacagcagagccaggactcaaacacaagtcctctaacttcagtctattataccacaatgccagccaaaaattcttacccgggaataaacagaactcaaaaaatattcaaaatgctaactttactctatggtggttatggataaagtgtgatgaaataagatcagcagctgtagaaacttaccttgaaaggtagagataagggatagctaaggtcaagaattcaaaactaacagcaatgcagtaatgctgaacttcaacacacatttctacaactgcgaagggctcagattttcttataggaagaaactctggtaggaaaaagctataatctcacaatttacaaagaaactacagggcattttgttttccttttgattcaccatggctaaaggataaagctctctctcctcctttataacccaactctagcaccagcttgaaagcaaaccttatacatcagtttcctcctgagtgaatggaatggcaagagccccctcagagttactgtgaccggatgaaaccacacaaccgagccctttgatcttcaagaagaatggtgctaagcactaacatgatcagtctttttcttttttcttttttgttccccatggtttttttcattacatttgtttgatcccttttcatgtgcccacagactattttatttgtatctctctcaaaattgaatttatttttagtagtactggtttataactatggagaaagaataaattatttctgtgaataaactatgagaagaaaattggaaaaaaaaggtaaagcttaactttaaccatcccccaccaaatacaccccaaacattttttaagctaatctaccttcgtgaagagaaagagaacaaacagagactgctggggggcactgccatcccattctgttttatgggagtaatgggacaggcaaagcttctttcacagtgagcgctgctgccaagagcgaggccggatcactaagtgacagcaacgcgaccctgcaccattagggaagtgcgtccacacacacgtgtgaccctgcaccactgggccagcacgtccacacacacacaaaactgcaccactaggccagtgcgttcacacacacgtgacaccacaccactaggccagcaagtccacaaacactcatgacaccacaccagtaggccagctcgtccacacacatgtgtgcaacactgcaccactaggccagcatgtccacacacacgtgacacaccagtaggccagtgtgtccacatatacgcgtgcaacacagcaccactaggccagtacatccacaaacaatcgtgacaccacacaagtaggccagtgcatccacacatgcgtgtgcgacacaccactaggccagtgcgtccacacacacgtgcaaaattgcaccattaggccagcatgtccacatgcatatgagacactgcaccattaagccagtgcgtccacacacacgtgacactacactactaggccggcacgtccacacactcatgcaaaattgcaccactaggccagcacatccacacacacacgtaaaattgcaccattaggccagcgcgtccacatgcacgagacactgcaccacaaagccagcgtgtccacacacacgtgacactgcaccactggatcagcacatccacacactcacgcgacactgcaccattaggccagcttgttcagtgaccaaacaaccacctgtcatctgatgtctttgaaaaaaatccaagtcacaaaaggatgttgtatttgacacttacaaaatcaaattcaaggtaaaagttttataaagcagctaccactttttatgaccactttaaagaaaacaccacaggagaaaaaaaaactaattaatgaggattataattatatacccagtgaaaagaagataaagtattaccactgtagcactccagctgtggtggccagtgaaaggacagtgacttacacatttacacatctccaagaaacatctgattgtaaacttagctacagtaaattcatggaaatcagatggaattatttaggataacttgttcttctaaaaatgctaaagataaaaatgggccagacgtggtggctcatgcctgtaatcccagcactttgggaggctgaggtgggtgatcacttgaggtcaggagttcaagaccagcctggccaagatggtgaaaccctgtctctactaaaaatacaaaaattagctgggcatcgtggcacatgcctgtagtcccagctactcgggagactgaggtaggagaatgaatcacttgaacccaggaggcggaggttgcagtaaagtgagccaagatcaagccactgagctccagcctgggtgacagagcaacaccccgtctcagaaaaaaagattctacaaatctcaataccaatgataagtactcaaatatgttgattttaagcatttatgtcaaaacatgttgaatacagttacatatctcacatatttgttcaactgaaactctaaatcgattaaaatcttttccctcaacccgtgagacaagacggaaacaggaaggaaagagtatgcaaaccagtgtaagaagtattccaggatttggctgagtgcggtggttcacacttgcaatcccagcactttgggaggtcaaagtgggtggattgcttaagtttaggagttcaagaccagcctgggcaagatggtaaaagctcatctctatgaaaaatacaaaaattagccaggtgtggtggtgcacacctgtagtcccagctacttggggaggtaggattgcctgagcccaggagtttgaggctgcagtgagccataatctcaccactgcactccaggctggacaacagagcgagatcctgtctcaaaaaaaaaaaaaaaaaaaagacaagaaatattccaggattaagtcatcggtcccagctaacaatattccaggattaagtcaccggtcccaggtaacaatattccaggattaagtcaccggtcccagctaacaatattccaggattaagtcaccagtcccagctaacaatattccaggattaagtcactggtcccagctaacaatattccaggattaagtcactggtcccaggtaacaatttaactgttccatcaatataatcaaccctgcattaacttcctttgttcagcaagtgagcttaagcttggaaagccaatcttaaaagtcacacaaagcttgtggaagttcacaagaagtttataaaacactgagaaactctctaaattcatctaaattcctgtaagaagtcaaacctaactacatccatgccataccccacagcagagttggcaaactatggccagaaaagccatatctggcacaccgcctgcttcctgtggcctgagagaagagttttcccatttttaaatggctgaaaaagaaagcaaaagaagaatatttcctgacacatgaaaattaaatgaaactcaaatttcaatatccatcaagttttactgcagcccagccacttcatttatttccatgttgtctattgcttttatgccacaatggctgagctgagtcactgcaacagataccatgtgaaacatcagctgacccgaaaagcttgccaaagcctgccctaaagttgctactaatttaccttgaaataactgactttagctatgtagctttgcaaaaaagactccaggtggttttcctgaataccatctgagcatcagaatggagaaattattgtaactcattgtagttttaagataaaagctaccaaaatcctagtattttgttaaaaccatattacagtacttaacaaaaaaaaagtagtctttcaccactttatttccagtgaggaaagggttttaagaatatcagtagtcttacttcctataccacttaaaaggcacaaagtcagccatacacacacaaaatgagccattatgggcatccttttcttgaaagagacagaaaatacccaaagatgcaaatgtcatggtcatttttttgacataatttctgaagacattatgactggctggaatgttaccttctgcctcagaatgaaatcttcaatatctttctacccatctcctccccctgccaatgaagctgtatagtaggaaatttttcagacatacagaaaatggaagaatagttcaatgaaaatctctataaattttgcctgggttctcaagtaattacacgctgccatatctgcttcatccatttctctgtcttttctagtggcaggaattaaatctttagaaagtaaactgcagaccatcagaacactttttcccacctcagcttcccaaaatgccaggattacagatgtgagccaccacacctggcccatcggaacatttcacccacatacttcagcaaacaataccaggataataatttccaaggaaatgaagatacaataatatagaaacagcattaaaaagtaaattatcaaaaaaaaaaaagagagagagaagtaaagctagattagtgaagacacggagaacctctgcaatctcaacaatccagagcggacactggcatgttcactgaggccaaaagaggagtctgattaatacagtgactactaaaagatcaggagaaattactctccacctcctgcactcagtgactcctccttcacatggaagagcacgtctccagtacttacctaagggcagcagcatggtaagtgtcaacgtaatcagaaatgaagagctctcggttcttgataactgggtctgtaatgacaagttctcttccagagtctgtcaaaaaattaattaagacgacattaaaactgagtttcccaaaacaagtaaaaaaaatttgtaaaacttttctttcacgtttaccacccactaaataaccgggcctggttagcatcgttaagtatgcaaaatagagaagaggaatcataaattgcaagaataacaataacagaatgtacagtttttgtcaacaaagtatcttcttggctatgttttataccccttagtaagaccctatattttgccaaaatggattaagcacaaatggaaaaagaagaaaaacaactatcttatcctagcacctccttcaactaccaaaatacttagtgatcctgtcttatttttcttgctaaatattacaaaatggagtgaacttacacagtttccattgataagaatatttttaacaaggaactataatttacacgctttaacagaggtttttttatagtttcaaagaaggaaaaaaaaaaaacagaaagataaaaaaagaacatcattcttccaagctgtttttcattggtttgttgactgtgagaaaagtggagcaggatcagggccaggcaaagtttgatgccagcgccagcactgccacttagacaatgcatggccccagcaacgtccttagcatctctcaacctcagtttcctcatctggaactagagagggacagacccacctcacgtgactaactggtagccaatgtgaatcatcaagcataaggcctaccaacactccaaaatccatttttcaaaaagttatcttcatttaatgaaatgtctttagaaagaactttgcccaaagctaagaaacacacaaatcaaaccacaaggacatatttaccattttcattatgtcgatcctgaaccaaatgctgatacacagaatctggaacctcagattgacggtagtaccatttgacgttcatgaggagatggtccctcttactctgaaaaggaaaatctaacagcattaggaacaggatttcaggtggccacaagtgcatatcatacccatgaccaaaagcccctgtaaacgggtggacacgtagatagggagagacacaattaccatcaggaccacaacaatacataagtcagttatgaggtcaagttttgttttttaaaaacacccatcaatagatccctctcaccttacccctctaaactgcttatttcaggaaacaaaaggagaccagtcttgaatctgtttatctccccagtttaactaatccattcaaaattacatttttatttaacattaactatacaatactacattaatatatccttctattttaatctttaatcattttggtaaatatttagagtcagtgttagctgactgtcaaggctcattaagggcaataaggctagaaagaacttaccccacaaggcctggcacaaaataatctcttctccaaggtttgcctattacccagactaaatcagattctccttccactgtttagccacagttattgttaagtgccaaatgaatatagcgaagaatgggtggtgatgaaggtactatgagtccagagacctcatctcatttatttccgaatctccagataatagaacatcttgtataaaattatttgtgaataatgaagaattttatgattatcacataaatgatcctgtaaatgtttgtaggacactgcactatgttatccctaaaagttaattttgttcccagtttgttcagagaataaaggatcaaatattgcccttccattagcaagttatggggctgcagcttgcaaaagatcatctctgtggctggtcaagaaatagctcaacagggagtgcactgaggttccctgcggcctcctaaaatacttttccaacccatgtgcggccttaacaggcttctccaaggtgaatgcagtatcatgcctttcagcagcctctacgttctcatcacaggcccgttggtcagtaatgaatgagagctaaaattcaagaaatgcctcatgtttataaaggggatgcctaaatcctaaaatatgataaaagagccctcattaatgaaggaagatgcttcctgctttaacgagcaagtcacaaatatagccaacactaaaacaccaggaaggttccaaaaaacctttgctaaaaaacacttaaaagccatttaaagaatcagaaagatgacaattgccacaagtttcaacagaactcaaatgtgaagatgtgttatttcttttttttttccttttcttttttttttttttgagaaggagcctcactgtgtcgcccaggctggagtgcagtggcgtgatctcggctcactgcaacctccacctcctaggttcaaacgattctcctgcctcagcctcccaagtagctgggattataggtgtgtgccaccatgcccagctattttttgtatttttagtagagacatgttttgacaatgttggccagactggtcaggaactcctgacctcaggtgatccatccacccacctcggcctcccaatctgctgggatttcaagcatgagccaccacgccggccgaaaatgtgctgttttaaagtaaatacaaaaattagccgggtatggtggggcatgcctataatcccagctactcaggaggctgaggcaggagaattgcttgaacctgggaggcggaagttgaggtgagccaagatcgtgccattgcactccagcctgggcaacaagagcaaaactccagctcaaaaaaaaaaaaaaaaaaaaaaaacagaacaaaacaaaacaaaaaaccaaagtaaataacataaataccaagattctttttttgcatttaactgtgccaaatacacatgcctacaaaaatacggcatcatcactggtttaattacactttatacatagaataatcctacatgatgagtactctttaatatttatgcattttatgcctttatattaaaatttctgatggcaaaaaaaactttctacactgtttatgcttcagatgggaaaaagaggacataccagtatgttaaataaatagaataaatgttacatgtagcagtttagagaaataattactttcagcaggggattatggatgtgctaacatctgacttgagaaaaaatgggagagatttcaatgaattttttcattgaaataaagatagacaaactactgaacatatccagaccccacagtccatctgcatgcatcaacgaagccattctggggaaatatggagaagaacctgagtcctgactctgtctggcctttagtgagcttacaggacaactggagttttctaactctattgctgaccaaatacacaggcagcaagggacaaatcgccaggacatgggagagcagctagaaagtgtaggagatcaggatataccacctcaaaatatgctctctggcacaaggattatttagccaagaacttaagaggggtagaggaaaaattatattttgtctccaagaaaacttagtttcttccctcggcaggataataaaaagcaggaccaggataagattactcattatagaaaaaatatatataaaccaggggaagaagcagcacctgtttggcagtgcttggggatgcattcagttaaaatacgctgtctataataaggacttgctcaacctcagcactactgacatttgggccagaggattctttgttgtggggatctgcctgtgcactgttagatgcttatgacatccccggcttctaaccactaattgccagtagcacccatcgtccagttctgacaaccaaaactgtctctaaacattgctaaatctcccctgtggggacaaaattgtccctagttgagaaatcactggtctagtaattcattttgttttgttttttaaggaaaacaaaatcagaatggcaaaaataaaacctggttcgagcactacagggtagggaagatggcctactggaaagaagatgggaaggcctgtggccccctccaatctcaattccatgacttcccatgtatgtgacttggggcacattaccgagattctcccaatctccccttttctgtaaaaaggagatactgaaatctacctaaaataattactgaaagaatagaaaagacagaaagcatctagaactgagtaggtgctcaatgaatattgtttcctctattggtaggtgattgtaaccaatagttcacagaaaaatctgaagaactgtgccgagaagtgtgggagttacttcttcaccagaacttggtttcctacaagggatgatagtgatctctagtcactgagctactaatacatgcttcagtgctcacagaaatgtattacttcactgagcatacaggagtccagatctactagcactcctaacaacaatcttttaaaatctaccatctatgtatttctgcaacacatttaagacatctgaaaacctgaagggcaacagaaataccttttagatacagtaactcaaatttgtacaatgtctatctttcagaaccaagccagggatactggtgatcttctgaagtacaatatctatgttatcttatggtgtaggaatacctactgattacacacacaaataaattaactgctttggtttatttgtacctagatgtatgactcctaatattatactttacaatggcagtgaaggaactattggattccccaatgcagtactatgcaataaccagggagtggcagcattgtgctgaaaagacttcacaatcaattccacagataaaacacacaaaggtagactggaagtaaacaacaatttgaaacaaatttaagtagctgtaatatccacaatctttctaaataggccggtaacttaattaaaaatgaaaagtccataaagggaggcagtgtgtggtttcagcagtactagattacaattaggtaatctaggattacagttcagtctgcaactgctagttgcaacctgagtggagtcccccaaccctatgaaaagtgaaggggtggaacaaaattgtttctatgctctctttccattcttacatgtttatatctagatttcctcctcaaacaaaaccaagtagataaaatgatgctgtgggagaatctctaattttttctctgtatctgtgcaatggcactggctaacggtgccatcctaaaggtttacaaattaaaatgtcaccttcagtggaagctggccactgctataatactgagggaagaagagagcatcccctccctgagtaagtgttcccagagctacctcagacacaaaagtattgctagaaagttagacacaggtaattatgtaattcctactactcactagttgaagaattttgttcaaaatcacagaaaattaaagccagacgtgaatttagagatcatgcgattcaagcaaaactgtctaagtttgaatcctggctctgcaacttactaagctatgtgactttgggcaagtaacttctccaagcctcaatgctctcatatacaaaatgggagaaaaccaagtttctaccttatttggttgtgaggattaaataaattaatataaagcaagtggatgagctcaaaaaatgtcagatattactatcattgttttacagaaaaagagagcagcaaagatagagagaaaagaggtcccttaaagtttttgcttttctaagattcaaaattatgttagtaatagtgtcatacagcaaattaagaggaaaatgtcttcatttttccaacaattctagaagcttgtcaagaatttctcaacaaataagcctcattttttactaccaatataatttaacaatggcataaatgtcaaaatgtttataaataatatatttcaaacagaatgcagaataaagagggaagtgaagcttcctgtgtgaaagcaccctagggtgtacttctgaatagtaagaggagaccactgggaagtaaataacttctcaccagtttgtttgtttgtttgtttgtttgtttagagacaaggtctcactctgttacccaggctggagtgcaatggcaccatcatggctcactgcagcctcgacctcccaggctcaagtgatcctcccgcctcagcctcctgagtaagtaggaacacaggcacccagctaatttttaaaatttttttgtagaggtggacatcttgctatgttttaagccactaaacaggagcacatccaatctgcttaacaataaagtttcaggactctgggcaaaaaaaaggggagggggagttgtttctgggctaaattatagaccctggctggatttctcttgaaatgaagaacatatgtcgatttaaggagattaatagaggacaaaatccatcccccaaatctgggcttagaaaaaagatccttatggtagctatctgggagcagaatagcaaagatttctacacatctttgaataacagacaatagtctgttgagatttaacaaatttaaaataactgaaatgaaacactcagaactagataactgacaagcggtagactaggggaaaaggaaggcaatggaaacaggcaaggccaagaaaaagttgctgttgaagggcaactgtgttgtcatcagcaacacacaacacagtctgcccaaacacagacacagggtctaacgttgagatggaaacttcctttcctagagatctttcatgattattaatttagtgttttatcaatttaaatagcctgagtctttcctagaaacagtcttaatatcagcctcagggcaatgtttttccacaacataaaaatagtaataataatcgagggggtatctggatagttcataaataccaataggactagggcagagagagagagagagtccttcacacagaggtggcctgcaagccagacagaacaactgtaaattcacctacgatacagaggaaagagcttctttgtcccactgatcaccagctgatgatacctgccaccagctcacagcagggattatcaggtccccaaagcctccaaaacagaccactcctgtccctctgtgttatcaaatgtgacagagatatcaaggccaaagacagcctcaacagagtacaaagatggatattagcaaataaataactttgccaagtcaaaacaatctgctggagagaagaggagtaacctcctgcatatatttaactgcttagtcatgggggctcttgattcagaaccaagtgaaatcagatcaaaattcttactctataagccaatatagccaaccaagtttctccagaaatttgggatgaagtggctaacatgtgtatactgtatggcttaaaaagatactttctgaagaaacttttcatgcatttccacaacatggtgataataaggttaagagttgtctgaacattagaggtttactgtataattcagaaatgtatacataaaacttttaattggtagtcagacactaattaagcatacagaggggggaacaccgtctcccagagacatcactatctcccttcaagtgtgctcaccaaccagtttaaagaggcattaactctgccagttgagcccacctccacttacaggacaatgactgttagacgtgtcaccttagctaagaccttggggacacagtcataatggctttgatcattcctgacttcaagggagaagggtagggacagacaatggggtcaaagatcactattcttcaaagatcaaagctaactccagatacagactgagtaacctcttatccaaaatacctgggaccagaggtgtttctgatttcagaattttctagattttggaatctttgggtatacataatgagatatcttggggatgggacccaagtctaaacacaaaatttatttatgtttcatataaacctcatacacatagcctgagggtaattatataaaacattttaataatatatgcagcctgtcacaaaggtcagatgtggaattttctacttactgcatcatgtcagcactcaaaaagttatggattttcaaattagagatgcccaacctgtatttatttacacaggtaaatcaaaactaaagataagctttctgtaccagtcatagttacccaacttcatggataaatatctgaaattaaatttaattcaattaaaatgaaattagatccaggaatcccacttctgtgaatttaccaaaatatttaaaatcagtttgtcaaagagaagcctgcactcccaagtttatcacagtactattcacaataaacaagttagggaatcaacctcagtgcctatcaacaatgaatggagacagaaaatgtggtgtgtgtgtatgtatgtgtgtgtatatgtgtatgtgtgtgtgtgtgtgtgtgtgtgtgtgtgtgtgtgtgtatatatatatataaaactactattcagtctttaaaaagaagactcctgtcatctgcaacaacatgaattgaactggagaatattatgctaagttaaataagccaggaattgaaagacaaataccacatgtgcttattacatgtggactcaaacaacccaactcacagaagtgaagagaagtggttacagaggctgggcagtggggggaatggggagctaatgctcaaagggtacaaaatctcagtaaagaagaataactgggttttttaaatgatcgactgcacaacatgattaatatagttaataacagtgtattgtacatttcaaaattggtaagagagtaaatttcaaatgttgccatcataaaaaatgataattagcttgaattattctacattgtattaatgaatcatacatcattttgtactccatacatatatacaattataagttgtcagcttacaacaaaatgaaattttaaaaatgaaattagataggaaatatcttgtaatatttcaagcctctaccctatttaacataagactctaagaatgcccgggcaccgtggcgcatgcctggaatcccagcactttgggaggcagaggcaggtggatcacctgaggtcaggagttcatgaccagcctggccaacatggtgaaaccctgtctctactaaaaatacaaaaattagttgggtgtggtggtgggtgcctataatcccagctactcgggaggctgagtgaggcagtagaatggcttgaacccagaaggtggaggttgcagtgagcggagatcgtgccactgcactccagcctgggcaacaagagcgcaactctgtctcaaaaccaaacaaacaaaaaggatctaagaattttacatatctatatatattatccatataactttacagccattacagctcaaaacgccaggaaagaggtatagaaaaacctaaagcagagtataccaccaggcctcaggccatcaaggttcatgtatcccagggttctgctctgacatggggaccagtgggtaaggggaaaaactgaaatactgactccacagactcttctcaggagaaagaaaggactgaatatactttataattacaccatcctatacacatctcccaaatgcactgagtcattaaacattttgtttcattttgagagggcagagtgaggcctcgcaagtaaatttcttattgccattgataaagtatccactcttgtttgatcctggaacaccttctcccaaccttggtgtattttagtgtagcgctggaactgaacagacctaaaaatccacagggtcgtcttctgcatccactctcagtggggcctgaatccacctatggaaggaccacggctgtggcacagctcccctcaggtggccacacaactcccatttctaaaataccttaaaacaaggggcaggtagaggaaaaataaaacaaaataaaatacctgggctgggtgtggtggctcacacctgtaatcccagcactttgggaggccaaggcaggtggatcacaagttcaggagttcaagaccagcctggccaagatgatgaaaccccgtctctactaaaaatacaaaaattagccgggtgtggtggcgaccgcctgtaatcccagctacttgggaggctgaggcagagaattgcttgaacccaggaggcggaagttgcagtgaactgagatggcaccactgcactccagcctgggcaacagagcaagactctgtctccaaaacaaaaaacaaacaaaaaaaaacctgaaaacaaaaattaaatgggacacagaatcctgttggtggtaacatcacatttattagcatttccaaatgggtatacctggaactactggtacatccaatatatagcagacttctggagggatctgctcacaactggaatagtaattttttttttttttttgagacggagtctcactctgtcacccaggttggagtgcagtggtgcgatctcggctcactgcaacctccgcctccagggttccagcaattctcctgccttagcattctgagtagctgggactacagcatgtgccaccacacccagctaattttttgtatttttagtagaaatggggtttcatcgtgttagccaggatggtcttgatctccagacctcgtgatccgcctgactcggcctcccaaagtgctgggatttctggtgtgaggcaccgcacccggccagaactagcataatgaatttttaaagagaagttaagtagatgaaagaaatagaagaccatggccacatccatctgactaggctgcttactgcttgtaggcactaggatcaaggttagaggctcattttcaaaacctatgagtggtattcaattcaaaagactgttgtcaagagataacatcagcatctgggtctgtgtgaaaggatttaaatcaccttctatcagatgttgaagcatgaagggggaatggtaggaaggcagatgactattcacagtgtttacaatcaagatatacaaataactggctacatacaaacactcagaaagatgatgtaactatgaatgtactgaagcacaggctcagatgatgggcaataatttcaaaaccactgtttcttgatgatgccttgtttgttaaacttctgccgctgttaaattatttttacactttaatatggagaaaaatcaaccaatattttggtaggaactaaaacagtgcatgaaaactaaatcatctctgaaatgctagctaaggagtcaaaactcattaaggattttctacttaggattatattgtgtatgaacactgaaattttcagacaattcattcttgtatttgtttgtagcagagaggccaaaactaagcacaggtaaaaccttgggaatatttgtacttcttgccctcatctgtaaactacaaggctgggtaactagatgacctctgttgtccttaatatcacacacacacagagataaactgtacgtcaaggggacttagcagatagggacagacatagcaaactaaagagcacttctgtagctccccaaaagtatcccacaatgtacttcaacctgactgtggggttaatatcaggtgtctgaactggattaagggacatctagatagttggtaaagcattatttctgggtgtgtctgtacaggtgttcctagaggagactggtgtgtcagatggtagcctgtgtgggaagatctgccctcaatgtaggtgggacagcatctaatcggctggggtccagaacagaacaaaaaaaagcagggaaaaggagactttgctctctctccaagagctaagacacctttcttctcctacctttggacatcagaactctaggtcctccagcctttggactgaggactcacaccagcggccccccaggctctctggccttcagcctcagacagagttgtactataggttcctttggttctgaggcttttgaacttgaactgagccatactatcagcttccccgcatctccagcttgcagatggcctgcgatggtctaaatgtttgtcaccctcagaaactcattctgaaacttaatccccaatgtaacagtattaacaagtgaggcctttaagaggtgattagatcacaaggagcctgataactcattaattcattgatgcattcatgggttaacgacttatcacaagagtgagtctcttataaaaaccaggttggctctctcttgtgagccctactgtcctggatgccttctaccacattatggcacagcacaaagccctccccagaggccaaccagatgcagccccttgacctgggacttcacagcctccagaactataataaatttattttctttataaattacccagtctcaggtattcagaaaaaaagactaagacatggctatcatgggacttagcttctatgatggagtgagatttattattcccttaataaatcccctctcatctgtctgtctatccatctgtctatctttctatccagccagccagccagccaattggttctgtctctctggagaaccctgactaatacactgacaaatactaaatgtcagattcagctttaaaagttcagttttgaagggtcaatttggcaagacgaaatttcgcagataaattaaaatcctacccttggacctccaaaatctgctgaccaaacacaaaaatgaatcccattctaaacagtattctcccagcagctctggttttatcagatcaacattctgaagcacaaattttctctttggtccaaaggatttctcccataaaggaagaaaaaaatagctattcgtagagagtgtaataagaaattgtcaaattcccccttaatccctactaaagctttaaacagtccattaaatttctttaaaagcaaaaaaaaaaaaaaaagagtacaaatatcacaaaatttgacatttttgtaataatactttggttgttgtttggtgacggcggtgatggcagtgatattattcatttggagggaattaatgacttcttacacatgacatagccagaaaagttacagagctcaaccacacatcaatggtggggtcagactttgcggtaatgagcaggatgtcaaagaaagggtggggaatttctcacattatttaacatcacattattttataagtaagacttaccaacttatgattaaagatacatggcagagattttacaattaaaaaccgatgatgagctaccatgataatatttccttgaggttgggcacagtggctcacatctgtaattccagcactttggaaggcagaggcatgaagaccgcttgagcccagtagtttgagactaacttggacaacaaagtcagactctgcctttacaaaaaatttaaacattagacaggcatggtgtcatgctcttgtagtcccagttattctggagactgaggcggtaggatctcctgagcccaacagctaaaggctgcaataagctatgatggcactgccacactccagcctgggtgacagagctagaccctgtcttaaaaaaaaagaaaatattttattgactcaatacactttttacagaaggacctctcaaacatcttaagcttcaagattccttagattcttaaaaattattaaagagtcaaagaacatgggttatagcttatcagtacttactgtatttaaaaataaaaaaatttctggctgggtgcggtggctcatgcctgtaatcccagcactttgggagactgaggcgggcggatcacgaggtcaagagatcgagaccatcctggccaacatggtgaaaccccgtctctactaaaaatacaaaaattagctgggcatggtggctcgtgcctgtagtcccagctactcaggaggctgaggcaggagaattgcttgaaccggggaagtggaggtgaaagtgaaattgcgccactgcactccagcctggcgacagagtgagactccatctcaaaaaataataataataaaaataaaaaaataaatttttttgtaatttatgaattcattaataacagtaataaacccactacatgctcgtgttaacataaataattataacaaataactataatttttagaacgaacataatgtaggaaatgagtaacacttttatttctgcaaatctcttttacttctggcttaataagaaaacagattcccatatctacttctgcttctgtattcaatctgttgagctatatcacacatcatttagccttttgtggaatgcactgtacactcctgagagaatgacagtgaaaaaaagcaaatgacgtcttggtatcattatgaaaacagttcaaccctacagacccctggaccatagttaagaatggctggtctctgagatgaagtcgacaagctgcacagatggctccaggtgccctctcttttagacacaatcatttaaataaaaagtatgctcccgaaacagcacaatgactagagattttaaggcacaaattcatttagatgtcagatactattaaaaaagatttcattattatttatacaaccaaacactccagacattccagtagagagcagaagttacacaagaagaaaaatctaaataggaagctctcattgtcaaatttaaggtatctttccaaaaactgagctcaggatataaaagaaatatttaaagcttgattcaaacaagtatttgtctacattaaaaaggtatactactttaaaacaacggtgaacccttgaagctgaaagcatgcagaaaataataacctagataatttccgctattccaggcaactttctggccatttcaaaaatgatactgcttcctacctgagaaaactggcatcattaaacaaaacctttaagaaaaagaaagatattagcttacaatgttaactgaatcatatcttttataatgactaatatacctaatttatgtgaatctagcaatattccgccctctcctggtgatatgctttttgtaccactgctgtctgaattaaaccctgagtgtagagttggtaacacagtaaagtaatttttagcaacacaaatatttgcacttttaagaagcactagagacacagttttagaaattactgactcaaaagttggcctgcataataggaatccaagtacagccagcaacttaccaataaacaaattcaaatagttggataagaaaagggaaaatcagcaggaacactaaaaaattatattttcctggtttacgtaaatcagtctgtcttatcttaaatatcttaattatttcttctcttcctttaacttaaaccaaaacaaagacggtaacctttaatactagttagtctatttataaccgttccatctacaaacatttttctaatacaaacatgccctgatagcttatcttggtgcacatgccagacaacaaaggcccactggcctgctggagaggagaaatggaaagcaggaaatgagaagccttagttaatctccaaataatcgatcagtgtattcagtcaagtgtgagctgagctgggaaaatgctgctttaaaaaagaaagaaagaaaatcaaagagcatgtgactggagccacaattcattttaaaatagggtaatttttgtcaaaaagattctgcatcacgttcaagcaccaacaacaacatacggaaatgttcatatcttctgcagtaagaccccttcctttaaaatctcttgtcatcttttttcaaaaacaagttccaacttttgggctttgtttcttatttcagtttatcttaattattgaggtataatttacatacacacaataaaattaacttattttgtttctactagttttgacaaatgtatagagttgtgtaacctccaccaaaatcaagataggcaacattcccattaccacaaaaagaccaacttccattacagaatcaacatttgctgtgatgaaaaggctttgggtgccagtgttgccagaaaagcaacattctaatctaacttccttcctccattttagcacacagagaagttaatatggagaaaaacaattcagagtctgctgtgactcttctatctattgctagagaatactacagacaggaatcccatgatctttaaatcaagtaatcggctagataaaacttctgggctaagaggtaatatggtctcaggaaattcctagaacatacaacagttttagcgacaagtgatataaaaataaacaaaaataatttcaaattagatctgagatatactttcctcaaactatataaggaatatttattgggcatctgctaggcaccagacactgttctggagatggttgctgagtatatagaagtgggaaaaacaggaagtcccagtcctggtagaacttccattccaatggaggagaagaccccttaccaattcccccaaccctctcctctaaaatgtccaataacggttaagtgcttttagaaagttatgatgaatgaaatctgccacttagtaaccataaatcctaggcaagtaacatttatttacactgttatttaatctctttggatattattttccttaaaattagtggtcttctcaaaagtacttcaggatagcaggaaaaactgtattgtgacctgatatgtcatatacagagacaggtttaaataaccctaatgattccatacaccagtttctctacctacaggacctaggaggaaacctaaatgtcttgcttgcttgctatcctgagcgtgttcatgaaaactcccaaaggtggctctactttcttgctttatctttcttatttttctttttaaagttttattatgaaatatttgacaggcagaaaggtataaaaataacagaaccatctgtaccaaacatacctaaagcaacaaaaacattatcgaacctaaagaagctgcctgtggaacctgcctacagcccagaggtaaccaccaccttgaattcactgatcattcccatccagtacttcatgcttttacttaatatatatatataactaaaaatacataaggtattattttgcatgtttttatactgtacataaatgacactagactctttgagttcttctataatatgctttgttctttcagcattacacttacatgatccatccacgccctagttcacttattttaagtgacatgtattaccttcatatacagcacatcacaatgtgttcatacattttcctgatagtagacatttgggtcatttccagttttccaccattacaaccttggttgtaataagtattcctatatatgttttcacacataaaacttttctattcaaattatttcgattactctgaatgtttggtatcacagctaagtgttcaaattttggtattggtaaaatgttgttcacagtgtcttactaagtaatttaaatatatattaaaggctaaaaaagtttatgtctaagcatggttttagataaagccattaactgtgatgtgttgccttttatttctggagacagtctcactctcacccaggctgcagtgcagtggcccaatcacaggtcactgcagccttgacctcctgggctcaagctctcctcctacctcagcctcctgagtagctgggactccaagcaaatgccaccacgcccagctaatttttgtactttttatagagatggggtttcaccatgttgcccaggctggtcttaaactcctgggctcaagcaatcctccctcctcagcctcccaaagtgctgggattatagacatgagccaccgtgcccaaccaatgtgttgtatttccattaataattcactgcaaaatattttctaatttccactgtgatttcttatttgacccacagactatttagaagaatctgggttccttctacacatctgtgtatttcccaggtactccttttggtcttgattcctagcttagtagcactatggtcacagaacatgttctgtatgatttcaatgctctgaaatatgttaagactatgatctatatatagtcttttttttttttttttttttttgagacgcagtctcgctctgtcgcccagactggagtgcagtggcacgatctcggctcactgcaagctccgcctctcgggttcatgccattctcctgcctcagcctcccgagtagctgggactacaggcgcccgccaccacgcccggctaatatatttttgtatttttagtagagatagggtttcatcatgttagccaggacggtctcaatctcctgacctcatgatccacctgcaatattatatagaaatgaaaatactgcaacttacaaaaacatgaatttcacaaacatgctaagccaaaaaaatcagacacgaacaaatatatattgcatttcattcccttcatatacgaagtacgaagacagacataactaatctgtgatggcagagctcacagcagtagttacgcagttagtggctaggagagggcacgagggtaacctctggagtgcacacattttatttcttgataccagaagttagacagatgtgttcactatatgaaaattcactgagctttctatttagaatgttctttcatgaatatatattagacttcaattaagtctaatttatgaaattaaaaattaacatctttctaaaattaaaagtctaattcgcaaatgctaaaatttacatacacatatacacattaacacgtatgcacatgaagtatctctggaaagatacaagaagctggcaacaattgttgcctctgaggaggagaaccctaaaacaacttataccaaaaagtaagaaagtgctcaaagaatgtgaaagacacgcgaaactcagcctgaaaggacagacctgctggactagttctgctagaacaacttgagaatcaacacataatgttagtaatagagtagaaactacaaagaaaaccagaaatcgtgcatccttgctgatataggtaaatgaataaagtgaatagttgctaaataaccggacactttcagagtcacagggcacctttccataaaatattaactgataacaaaggatgaaaaaagtaacctttttttttttttttttaaagacactgttttgctgttgtccaggctggagtgcactggtgcaatcacagttcactgcagcctcaacatcccactctcagactcccaagtagctaggactacaggcctgtgccaccacacctggctaatttaatatatatatatatatatatatatatattttttttttttttggcagagacagtgtctcactatgttgcccaggctggtcgctaactgctggctcaagcaatcccccaacctcggcctccaaaagtgctgggattagacttgggccattgtgcccacctcaaagaaataactttataattaacttttgggccttgtaaacccaatcttaagtgatcaaagtgaatgccagtaacagaaggaaccaaaattgtgccctacttggcagggtacaaggaaaagatcccaaacctgaatctaataatgaagaaatacgatacaaatgaaaactgagaaacattctacaatgtaactgaactgcaatattcaaaagtgtcaaggtcatgaaaatcaggggaagactgaagaactgttctaaaatgaagaggattaaagaaacataactaagtatataacctataattctgattagatccattccctacacagggcattgaaacaaaagccaaaatgtgtacagggtctgaggattagacagtaataatgttattaatgttaatttttaggtttgattgttgacttgagggctacatcagaaaatgtccttgtaagaaacacacatccattatgtatcagtgtgtaaaggggtatttatttggcaacttattctccagtggttctagggaaaaaaaaaaaaagttctctgtgttgtacctgcaccttttctataggcatggggtgggttagataaaagactggagaaataaattttagtgccaattataaaaatatgtaaccataggcagtggtcactaaaagccattttgacaaacaatcagagttaaaactcagtaaataagaagaaagttacatgtaactgtaaggataaaagcatgttaatgccagccagttaaaaattagtttcaggaatttagtccataataaagattaaattacagaatagcagggaaagatgaactatttaatgagtttgtagagattcctagaaagtcatctaaaaaaaattaagttgtatctatacctcatactgtatgattcaaaatgatctgaaatgagtctaaatgggtcaaagattgaaatgtaaagaataaaaccataataaaaaaatgcaaattaaacttatatgaagaatatattgctcatactggcaaatatccaagttgataacactctgctggccaggttatgggaaaagggttgtcattatgttttacagaaacataagctggcacaattgtgttatagaaagagtaactgggcaacatctaccaaaattacaaacatattcatctgtttctccagcacttattgaaatttattctaaagatacatttgtgctgggcacggtggctcatgcctgtaatcccagcactgtgggaggccgaggcaggcagatcacaaggtcaggagatggagaccatcctggctaacacggtgaaaccccgtctctactaaaaatacaaaaaaattagctgggcgtggtggcggcgcctgtagtcccagctacttgggaggctgaggcaggagaatggcgtgaacccgggaggcggaggttgcagtgagccaagatggcgccactgcactccagcctgggcgacagagagagactcaaaaaaaaaaaaagatgaaagaaagaaatttcatatgacttttgaatttttttgtttttttaaattatataaatgtattacctattcaaaaactatttttaaaaactcacagggtgtttgtttatgtcataggcctttgctctctctctctcccctctctttctatcctagtatattgctgctctttcttttttatgtagctagccttccagtggatagatggtgtctgaccaacagaattggaacctgcatcagccatatactgttaagagaataaaacggaacagaaacaagcctgtataattacagttggtcatgccaacagtctggtgaccaatcttttacacttaaaacttaaagaagttacacgttttcaactgcctgtagaagaaaatcacatactccttggccccccatactcatcatgctgacacagatcacttgagcttaaaaatgctcacaatgtttctgaaagtgaataggcacagagccttcaaatatgagatctagagtatctcactgaatataagatattccactcaatgctaccttataaaacaagccctagaatcaaaatagcttatcactacatcttattcattgtgagatataccgctgaggctggacatgcactttaaaagggaaagaggagccgggtgcagtggctcatgcctttaatcccagcacttgggaggccgagatgggcgatcacctgacgtcaggagtttgaaaccagcctggccaacatggcaaaaccctgtctctaccaaaaatacaaaaaagccaggtgcggtggcgggcgcctgtagtcccagctgctcaggaagctgaggcaggagaatggcttgaacctgggaggcagaggttgcagtgagccgagtttgcgccattgcactccagcctggatgacagagcaggactccatccgggaaagaaaaaaaaaagggcgggggggagaggaaatcattaataaggtgtaactgaaacctgtcctgaaagaaagcaatgagcacctctttttatcataacatattttgtctatgtttcgtatttccacaaactcctctttgattacagattatgtctttccaagaagactatttggcagcaaagtgctgacaaagtattgatggcagacctccttacacaaagcctattagcatttctattgctgcactgcacactctggtattataaatcacacacactcagcatcatgcccaataatcaaacagttacctaacaactaagggtattacaaacgcattgaactaatctttgaatatatgctgataattaaattccattatggtttctaactttaaacctaaaggcaggcaacactgaaatcaagtgtcatccactgtgccctcacatatgccatgaaatgtcatttatattatatagttcacttccaattactgaatacaccagccagagcatctatcactaatattaaaacaagcagaacccagcagtagagcagtggaaggcatcacatggtttaaatggatttctcacctttcaagtgtcaaggggtctttccaagaacatctcacttagggggttgttggccttttaacaaaggaagctgctccagttgaaagaaacattcaaaagacaagacatgctgtaaagcacagctcagagctagagacatctgccccttgtgttaaaacacaaaacagtaaaagatcctttatatgaaaaataaatacatgtaaaaattgagcttttgtcaaggttactaacaaagaagttatgttaatatctaaggagcccttgtttaggcacatgccccacagaaattagggagccctcctgtccagaagatctattaatttcccagtttttaagaccaaagaaatgtttcttgaaatccttgcttggagccccaaagttaaagcagccatcaagcacaaagctatgccccactgtgttccgctgtctgtgtccatgtctgttactcacgcagaaccaccacgattagcacaagttaaatttcatggctacgtagaaatgcacattccagctctctgcctactaccatcacatgatgatctttaaaacaagaatcaagaaaacgttcctaatcctctgtgttcagaaaagcttttactgtcaaaagaaaactttaatagctgactcttggtaattaacacataatagagccaccactaacctattaacaatattaccgtattctataattggagggtaaaaattagctatagagggaattgtaggaaatcattttctagctctaccatcaatgttatgtcagataggctaacaagaaaaactgttagagttctaaatggcagtaaataattattggaacataaaatgaaacaacgcccaagaaaattcaatctgaccacacagaagaaaagatagtggaaccaggcctagggaatttatagagactactgcctctgcattaataaagaaatcattatctggtaactataactcaaatcaggctctagaacaatggttcttaacttttgctacaactaccccatctgaaatctgcatgccatgcaaactactgcctaaggcggggcacagtggctcacgcctgtaatcccaacactctgggaggccaaggcaggtggctcaccggaggtcaggagttcgagaccggcctggccaacatggtaaaaccccgtctctactaaaaatacaaaaattagttgggcgtggtggcgcatgcctgtaatcccagctacatgggaggctgagacaggagaactgcttgaccctgggaggtggaggttgcagtgaactgagatcgcgtctgggatccagcctgggagagagagagcaagactccatctcaaaaaagacaaaaagaaaaaacacaagataaaggatgcttaaaacctaaccaagtatcaacagtaaaatcgaaggacacttagaaaattaactgacattatagacaacgtcaagtaatttgacatcatctcttctttgaaattcaccatcccatcatgtgagcctatgtatacagctcctagtagcggataaagtaggcaaacttacatgaagaaagaattccattactataagctatcattaaacaacttaaatatctagagaaaattcatgaataataactgaggtgattcagagtccacagcataaccagtttaattgcatttaccacataactggtccatatacactggaactctgaacgtgctagacgagtgaaagcaaatgtgaaagcttttatttcagttctaatgtactgcataataaaatttaaaaacacacacaactaaaatgtggattaaatccaaaaactataatttcattaaattgcattataagattttcacttactaaaatacagaaaatgttttctaatatgcattggacttttttagttatactttacatgtgaaatgcagagatttttagatacactatttagtttttataaaggctcaactcaaaacagttctatcactccagaaagttctctcaagcactttcccagtcaatcctcaccctacccatagaaaacctcgatctagctagctagctagctatttttggagacagggtctcactgtgtcgctcagactggagtacagtgtggtgtgatctcggctcactgcaagctccacctcccaggctcaagtgatcctcccacttgagttgtgtgccaccatgctcagctaatttttttatttttgtttttgtagagaagaggtgtcatttcactatgttgccaagactgatctcgaattcctgggctcaagggatcctcctcccatctcaggctcccaaagtgctgggattacaggtgtgagcaaccagatcctgctactactctgatttccatcacagattaatcatagggcagattcatatttaactttttaagaaattgtcaaactattcaagtggttgtaccatcttcattgccaccaacaatgtatgagaacttgcattcctgacaaccttgctaacattcagggttatccatctcttcaatttagccattctagaggctgttttggggatcttattgtgacttaatttgcatttccctgatgaccaataatgatgggcactttttcatgggcttatctgccattaatgtgtctctgtttaagactctgtcaattttaaaacactgatttggtcttatcctataagagtgttgtttgttggaaggtatttttttaaatgtattctgcatccaattgctttctcagacatatgagtgacaaatattttcttacagtctgaagctgccctattttcataacaatgtcttttgatgaattccaatttttttcatttgtggttagtactttctatcccctcattaagaaatcattgcctaaatgaaagtaaacacactctcctgatttcttctacaagtttttataggtttgagattatatttagatcaatgatccatctcaaattaatgtatggtatgaggttgggttatatcctgtttttcacatagggattatccagttgttccagcccatttattgaaaagatttttttcccactgaaaataatttgatcatatatgtgtggattcatttaattttgcattcaagagatataaagcacatctcagtccacaggatcactggcattttaatcttactttgtatagtattaccaatattggaaagcatcatttcctaatattaatatacctcatatttacatgaaacaaaatattggtgtaataggtacatagagattttttttccatttgagttatgcaattacacttcttaaatatattattatttaatatgtatgcatatacactggaactgttgtgacacttttaatggctaatgttcatgtttataaaatatgtaaattttcagctattaatataattgcttgctggtatataatatcagataaaatgtatataacaaaaataatcatataaaataacaccgtttcctcaaatctccaacctcagctaccacacagttgctcctctggttcaatgtaaaattttcctcaaaagttaatatattttaagttattattttaaagagagagggtcttgctgtgttacccaggctgcagcgcagtggctatccacagggctgatcacagcacacaatagccttaaactcctgggttcaagcaatcctaccgcctcagcctcccaagtattaatgactgggactataggtgtgtatcactgtgcctgcttttttttttttctctctctttctttaaaaactttttttctttttttttttttggggggtagagacagggtctcactgtgtcacccaggctggtctcaaactcctggcctctacctcccaaaatactgggattacaggcatgctccaccacacttggctattatattttaagggttactttctaaaccataggaaaattagctgggtgtggtggtgggcacctgtaatgccagctactggggaggctgaagcaggagaattgttgaacctgggaggcagaggttgcagtgagctgagactgtgccactgcactccagcctgggaaacaagagtgaaactccatctcaaaaacaaacaaacaaaacacacacacatacaccctgaaatctctaacactgataccgggcaggggtagtggtcacggtatagagaacagcatattctcaccatcaaaggtgaaatttcacaggccaattagggtactgatttaagatgataggaccagggtctcttttacatagatctgagcctggcctaggaaaaatcctagaaaaaacttacatgcttgtacctctgacacagactagatcatatcaatgggggttggggacaaaagccaactagcaaaggataaaacgattcctctgtctgatcttgtcttcagtatctatttctccctcatggtttatacaggaatggtggcagccatgagagataatgggttaagatttaagaactcaagtgtctgcggtcctggggcttagtaaaactctggttcaataaaaactaacatactagaagtactagaaggatggtagcattggcagcatagtttacaaatgtcccttaatccccacacaaaaacagattagagagtcaaagcaaattcctgctgacacacaacaaaattcagaaataaggcatctctacaaaccgcaaaatataagcaggttggaagggataaactaccatcagccataagatctctggatatgagcatctgcacgagagaaaacagaatcaatcaatgagatatgggatacagctaagatcaggaggaccgtaaaatagctaccaggcaatgaggaaggccaatgtgtgaagagcagctgaagcctggtggggttgcccatgccgacagcaggtcagaacccccagagaccttgcagggctaaaggggctgaagtcatctagacacttttgaactcttcaaaactggcccaccatagctccctgccggcacaaggagccaaggcaggggagaaactaccagtaatggaatataaattctgcaaaaaatacaaaataatttaaattaattaaataatttaaataaattaaagaaaaaagaagatccaaatgaaagtgaaggagaggaacagagtcagaaaatcacagcaagctgccatttttttaacactgcataaaaacaacagaagggggagctccgtaaagttaaaaattcaggaaaattaaattcgcataaaaacaagcaaaagcaaagtacattatacaaacctcatataatgttactattttaaaaagagaatacagaacagaataacacccctacagacaaggacagtacaacaactgggctcataaaaaacaaaaaactataatgtactacttcaaaacatgctaaagatattattaaataaattataccagatattagacagtaacaaaaatcagaaacaagaaaattcagaaatgaagtgacagacataaataatttcaaaaattaagactaaacccgaagcaatataaaagtgagtgaacacagctggcaatgtcttaagaaaaagagaagtcagaaagaaataaacatttaaaagtcaaaagaaataaaaaatatgaaaaggactaaggagaaagtaacaaatattaaaaataggcactgggcatggtgacttacacctgtaatcccaatgctttgggaggctcaggcaggaggacaggagttcgagaccagccttggcagcagagcaagaccctatctcaacgaaaaataaaaaaaaattatctgggcatgatggtgtaggcctgtagtcccagctactagggagtatgaggcaggaaaatcacataagcacaggaatttgaggttacagtgagctatgatcctgccacggtattccagcctgggtgacagaatgagaaaccctgtctcaaaggaatccattagagaacaaacttcagaccacaaacaaaaatgactacagagacagctacataaggactagtggtgaagatgaagtatatagtgacttgaagaactaagactaaatgagggttaaaaagactatagtgtgtaatctaaaaatgcagacattctattatcatttaacacacagaaggagaaaagggagagtgcaaacaaaaattttttattttactgtttccagaaatcataattggtggtgtcagtactagtattgttactctgaaactactgtataggtagatgagataaagaagtaattatgagtccaggcccagtggctcacccttgtaatcccagcacttaaggaggccaaggcgggtggatcactttagtcaggagtccaagaccagcttggccaacgtggtgaaaccccgtctctactcaaagtacaaaaaaattagccaggtgtggtggcatatgcctgtggtcccagctactgggaggctgaggtaggaggatcacttgaaccagggaggcaaggttgcagtgagccaagatcatgccactgcactccagcctgggcaacggagcaagactccatctcaaaaaaaaaaaaaaagaagtaattacgggatagtctaattctgtcaccccttgtgtccttgagaaccagaaatctgtctgaaagaaaagagatagagatggaaatagctgacgttaaataaaaactctgtaatcctggatttaaatgagacagcgtgttgtatcagtataaattgtaagacatcatatataatatttcccagctctgtccactccaattatagatattttaacatcattagtatataaatcaagaggcccagaaataataaacagcccagcagcaatgagactcaaatgttctagattatgctcttgcgataacatctctcactaaaagaaaccagggatttgagaagagatgctaattatgtgtctgctgcaagacatgtacaagatgaggatggaacaccttggcatagagatagtaaggaaactatcaaagattcccaggatcatgtcagaaggactcaggagccaataagaggttcctactaaccaaaaatgggacaatctggcttcaataaggattaggaattgcaattagctgaaatccatcaaataggtttaagaatactccaatgtattatttgaaaactgggtaaataaacggaagcaaccaaacctttattctgtctttcctatataaattgtgcaactgggtaacaagacagtagatgacagacaacactaccatataaaattattctagctaataaatgaaactgaaatcatataattaaaatcttacaattttgaaaatctcaaggaattaatggatacaggctaacaaaaatcagacattatacacttcctgataaaaatatcctacaccacctgtaatcttgcccaaatggaacagacctgagtctcatcaaacctctggatccagctactaatacacaagaaatgcaggggtcagaggcacatctttaactgtactacacaatcaataaaatccagattgcagtagattatctaggtcaaatgacttggaatcaacaacaaacaaaatttaggaaagtaaagcaacgcagcgagagatctgcagagtattttataatagattcagaagacatatcatatgcataactaaactatagtgtacagacatctacacctgggtgacaaaactataatggaatataattactgtatatcaagatagtgatgaattccttagggaaagaaggaattgtcattgcagaggacctcgaagatggctggccacgtcctgtttcttgacctgggaggtaattacacattataattcattaagctatacatatgttttgtgtggctgtatgtatctgtgttttattctacaatcaaaaggattttaaaaagaaaacactaatagcacagctcacctgtattctgcttagaaaaatgcatcaactaaagctatggcaaccacagaaagaaactcaggagaagggaagcgaatctaaaagacaagtcccatcaggataaaggtgaacttcctgactcagacagacttcagctggagaccagatgccacagatgcactatatgagcagataaaagatggattttaaccaatgctcacaaacttaaacattccataattatgtggtttctagctgaaagacaaaatagcatccaaaccaaaagaactaaattagaaaatgtatgttaagaaaatagaaacacaatatgagaaagcagctggaattgtcacaggatcccacaaaaggaagaatagctgcttaacacataatagataatcccttcccagtctggagtgatcagaatgacatccttggattaagaatgcagcccaggaaactaaaatttaagaataattcggaaatataaaaagcaaaaaacatttatgggagaacttgcattaactcataataaatgccacagacataaagcttctgatagaacaagccccttcccagcctctaggtctgaaaagccttaaaggagtcctcatttccctcctctttcacacatcaaacagcaagtcgaaaaccaggaagtcttcaattgtcctctatagaaaattacataggaaaagtttaagcacaggctttaaaattatggagacttgggttcgaaatctggctctcatactatgtgacattaggaaaattactgaacatctctgagcctctattcccaatctgcaaaaccagaatcatttccattgacccttacaagggaacactacaaggagttccttccagccccagtgcatctaataattacctcaaattattccactgaattctaactgttccctatctacaatacaaatcactgacagcaaagacacatttttgttgcaaagcagataaacactgcttgttaacttcacatccctcccctccaccactaactctaacagcattctgggtcagacccctcatacagttcatgtgaactgtctcagtagcttcccaatttgctctatctctaatctttcttaaagaggaattctgatcacatactcatctgctaaaacacgatcttggctccccagtgaccaacaaataaaatctagtttctcagctttcagagctcagcacacctttccagttctatcccccaccactctctttaccaaaccaagctggactccaacattcaacaaaaatattctgcctctattctttgtctaaaaagtttttctattctccagtcaaattctttccaaccttgtgagtcccaccttaaaagctcgtactttgactaagtccttccctcagaaaccactctcacacttccccaagctctgttctctgcagggtatgttgggaccctgaaagacatgtttcattagtgttactcgctttgaaacactctgcgtgcagatgccgtatcttactcatattcttacattcaacaaacacacattaagttcccactatgtgccatgcactgtaaagcctgaagccacagcagtaaacaaaacaagcagatgtctctcccttcatggagctggccattcttgataggcagactaattcatttcttttccctcctgcgcaatggactgttcttcatgcagtatttatttaataaatgctggctgaatttaataaaaacatttcaaaagaccaattaacacaatggggaaatttaaagtaaatcattgaaaactctcatttatattctaatctgcaaatttaacatattctagcaggccttctctttttcagaaacacgtctgactttttaaattcatcaaaagtccctcaaagtgcctgggctggagaagtcccaaggcctacccttcccaaacccctcatcgaagggtcgtcgcctcgtccagtctctctgggtggccatgcttggttttatgtaactctggcctagggcatcccactgactctatgaggagtgaccccctgacccaaaaggcagccaaatcttgagcagacaaaaacacatacattacaggataaaaagataagctggcccaaattctgtcagtaacttgaaataatggtaactaagtaatatcaggaaagaagaaataaggatgcaagatgccaaacaaaatctttatgaaatacttttgatcatgaacttatctgctaaatcatccctcaagtagaaacaggagcccagagcttctctcacagaacctccctttggacatcttccatagtgatcccccaaaatgtaccaccttaaaacatggcttaagaaactactgactgaggctgggcacagtggctcatgcctgtaatcccagcacttcaggaagccaaggcaggcagatcacttgaggtgaggagttcaagaccagcctggccaacatggtgaaaccccatctctactaaaaatacaaacatcagctgggtgtggtggcaggcacctgtaatcccagctacttgggaggatgaggcaggagaatcacttcaactggggaggcggaggttgcagtgagctgagatggtgccactacactccagcctgggcaactgagcaggactctgtcccaaaaaacaaacaaacaaacaaaaactactgacaaggccaggcgtggtggctcacacctgtaatctcagaactttggaaggctgaggtgggcagatcacctgaggtcaggagttctagaccagcctggccaacatggtgaaacctggtctctactaaaaataaaaaatgtattcaggtatggtggtgcatgcctgtaatcccagctacttgggaggctgaggcagaagaatcagttgaatctgggaggtggaggttgcagtgagtcaagatcaagccactgcactccagcatgggaaactgagtgagaccctgtctcaaaaacaaacaaacaaacactactgaccaagtaatagataaaaaccaaataatcagcttgctaaattccaagtatttactcacatttttatttattttttatgcattcatttggcgccctatttattgaatatctaactaagtgctaggtcctgtgatagtcacagaataagacagattaggtcttgctctcaaatttattttattggagaaaggcaaacaagagtttgccccctagttcctcccactttctttctttgtgctgagaaacacagggtgccttcacagttctgtgacctggacagctgcaagttttgccttgaaggcttgagcccaagctgagggcttagccattcccaggcactgctgaaatactgcaagaccaaatgtggcaaaactcacagaaactggttccgaccacgaatcgaattcctcaaaccctcatataaactctataacctgacccctcctcatagacacatctaggtagaacatctcttgtctcaatgtctatcgcaagtgtggtacagccctctgtgtgtaagttcccctaataaatgctttttttgccctgctgtttagtgcttctttctttggaatcctaatcagcaccacctcaggactaagtcagtcccttgcaggaacactcctaccaccattgcttttggggtaaatccatctgagagctggccagacagaacaagtaaacaaaccaacaaggtaatttcagatgataatcagtgccataaaaacaataaagatatgaaaactgagcagtatcttagaaaatgactaagaaggaaaaggggtggggcctgaataaaatggtaagaaaaacctcccagaataggtgccattcgaacacctgacaaaaaatgagtcaaccactcagggatacagcacaaagccatcaaatcaaaaagagtccacaatccacactcaacagtactatggaccacagagaatgtcagaaatgtttaaaactgttttctccctcaagaggcttaaattccatttggggaggtaaattaactcaggaaacaaattttatgaaactgcagagacttcagctgaaggccagagatgccctgggaacaaatggaaatgcagtgcggcccaccggtcatgttccctcaaaggccaagttagtgcctctggtattctcattctggtacctatgctgctggaaatagtatacaaactatgcctttaagctttccaaattggaacctgaaattttaaaaatcttaattagtccacacttacgaaatacgaaggcttccaggcacactgtctgtttgctgttctggaaaatctagtccttgaattgcatttccttcacttacctgtgaggttccttgacttcttcccactcttgcagccttctcagccacgctgattcacagctgctgcttccctctgagggaccacacgcctgctctcacccagaatcctctagcagtttctttttctagaaacagctgaagaactgctgagtagaaagagtctgcaaactatcccgactgcactgtattattccatcagtgtgtggagcaactgaaaagttacttggctatatcagatgttaagaactgagcacaagcttcccaaatgtgtgttcactataaagaggaaagccagcagacctcttccaactgagactctgaagagaaggctgcaagagatttctgtggcgctgacatcagatctactacatcatgtcccagcctccacggggcaacaagaaagtaaagatcaaaccacctgagctgccagataaggaacgcctttctctataaataacttactgatgtgaagaggcttttctgggataaaacaagtagaaaagttatatattgtacaaaaagaatggtcaagagaaagatggtgtaaaagcaagaaaaatcttgaccctcccagaagccactggctgtttttgaccacccattgacagtgaattgcaaatggccatcagcactctttttgctttaaaaaaaaaaaaaagaaaagaaaagccaatttatgccattagatgaaaatccaagtatcatcacctattttcaatgcaaaatgcaaactgtctatatagccacctaatgaaccctgccctaacatgttcccacaatccaaatccagttagtgactggaaattatccacaggacgacaactccaggaagcagttgcctcctggctaaaccaagaagacttaggagtactagtttctacacctagaatccacttttctctccttttcaaacctgtctaagccaactccaaattcactccaaattctcctccttagcattatcaactgacaggttccatcacgcatgcttccttcgcagttcacacttactatgccaaatgcactgctttcttgtgaaacacatctaacgtatgtcctgcccttcccacagaaatctgcacatgctgagggaaagaactcagatcctgtcttaaagatgctgctaccattcatttaatcccttcctctaaaggtgcctactataaaatgatacgtaaggtgagggtttaataaactttggcttaacacactgaaaggaaacaaagatttttatagaaggaaaaaacactgtaatgctaatgtgaagtagtaccttcacagtaaagacattttacagtacttccctcctcaatgaaaaggaacaaagaaatacaactgaaaacatcaacaatttaactaaatcacaggccatttcatgtttagcaacttgtctttaaaaccctccctactacacttccaccctaaatgcatttacatgcaagacataacaggctcctgcccttccaaaccagcaaaaggtactttttttttcttttttaaagacaccgtctctgtctgtcacccaggctggatggagtgcgatgctgtaatcttggctcactgcagtctcgacctccccaggctcaagcaatcctcctacctcttcctcccaagtatctgggactacaggtgcataccaccatgcccggctaatttttgtacttttttgtagagatcgggtttcaccacgttgcccaggcttatcttaaactcctgggctctagtgatccacccgcttcggcctcccaaagtgctgggattacaggcatgagccactgcatccagcctaaaaaaaaatcttttaaaagccatctttggctggtgcagtggttcacgccagtaattccagcactttgggaggcctaagtgagaagaatgcttgtggccaggaattcaagactagcctgggaaacatagtgagatcccatctcaaaagaaaaaagtcatctttgcgcagagttctacttttacaccctatcctaggagaatcaaacttaatcatatttgcgtggagataatccatgtttgtttaagaaaatgaacagaaattcaattcataaatttagttctaaatcattaaaatacaaatacatgtaaaacgtgttgaaactgttcttacctacaatcgccatgtaatctcttctatcattctactctgttttggtattcttcacatgtttttccatctgagatatgcaatagttctcctaatcccaagaaatggctacaaccttggggtcattactactcaggaactgggctgtttgtggatctcattctgtgctgaatggtgcgactggtttcagacatgtccaactgtggcagagagtgcttgttccccattcaacgtccattctccccattttccataataacagagcacctacgttactggagcacagtaaaccaaagttgttaggcacggctactggaaaagctctggaatgggcctaaaatagcttttgctgtgtgcccctctgataagggtcagctgtgtccccacccaaatctcatcttgaattgtagctcccataattcccatgtgttgtgggaaagagccagtgggaggtgactgaatcatgggggtgggtctttcgtgtgctgttcttgtgatagtgaatacgtctcatgagatctgattgttttataaaggggagttcccctgcacacgttctcttgcctgccaccatgtaaaacatgactttgctccttatttgcctccttatttgccatgattgtgaggcctccccagccatgtgcaactgtgagccaattaaacctctttcctttataaatgacccagtctcaggtatggctttattagcagcatgagaacagactaatacaccctccttcagctgcctggctgggatggaggaccagtgtcccccaatccactgcagagcagtgatttttacaatgttaaacggctagaaaagtttctaaacagatactttcagcttctctattcatctcctggtggactggtagcaaacagtcctattggtgagccaccatttgaatagcactggtctagagcatggactttaggggctgtggctccagccaccatctgggaccatggcgagaccttgagaagaaaaccatgcaccggggcagacaggaggagactagatacctgaggtttaggtcactctaccaacccggggcagcacaccctgaaaacacctcattttatatgagaacatagatgtttatcttaaacaactacgatttggggttatataataaacagccaatccgaacaacaactgacgctcccattttgcagaccactacaaaaatgtcacagcactacattatcgctttttattctcacatgagaataaccctatgaagcatgtagcatgggtattattttggtttgacagctatggaaactaatgtcctaaaaggttaaatagcttgtctaaagtaacacagccagcaagtatagacccgcaaacaaaagccagctaggtaccctttccaaaacaactcacctctccatgaagtgaaatcatctcatcacgactgtacataaaatacgctgtaaatgatcagaggtgtgtacttacaacaaactacataaaatgtgtatgccactgggtagaaagatacaacaaaaatgtcacagtcaactagttaatataaaatcagatttaatggctacagtgagaatgtactgcattttacagtggtaacaaagcatctgtgaaagtagacagaggcgcagaaaccacagacaatttttataataatttagccagcaatatagcaagtgaactatgagcaaatactacaatatagtctcaacatttgagcctctacatataacatatagtctcaactaatactagatgtaaatacaatatattaataaataataatgtttaagacagtttgaataataatgtcatggttaatagtaacatattatcctttagcataaataagacttctgagaatcactggcaatcagatgcgctctgaaccattcttttgatggtaaagaaggttggcagagagccatccccactcacttccaggaggccctgatgagcaaaagcatattattaaaaagctgcgggggccaggcacagtggctcacacctgttaatcccagtgccttgggaggccaaggcaggaggatcatttgaggccaggagcctgataccagcctgggcaacatagtgagacttcatctctacaaaacattacaaaattagccaggtgtggtggcatgtgcttgtgtggtcccagctactcaaaaggctgaggcaggaggatcgcttgagcccaggagcttaaggctgcagtgctctatgatcacaccactcattccagcctaggtgacagagcaagaccgtgtccaaaaaaaaaaaaaaaaagctgctggtttggatctaccatgttatctgtgactgtggactaacttttctttgggtaaaatttctttgcctatgtgggtatcaaccattttatttcatctgaaaaaaaaaatgctaaagcatttgtccatatccatacttaactgttaaatattaaacagaaaagttatatttatcattaaataccaataaaaacttttctgttgtcctgaatattttgttacaacattaaaaaaagtacacacacacaagaaaaattcagacaaactttaatgtattttattattaatgttttatttttatgtattattttaatgtatttatttttatgtatttatgtattttatgtatttattttaatgtattattttaattgtattttattatgtacatattttcctgtcatattttcccttcagaaacaaactgccaaagaaaaaagatgaaaaagcatgtttaagcaatatttaattgctcctagcatttaaacatgttataaaaatccttaaagatcattagtaaaaatgagttcttacaatacctatccactagtacactatacaaaaaacaattaatggaaggaggagtggttagagggatgtattggtagagatatagatatattttaaaaaaggatgcatcaactcaaataatataggaaagaagaaatgcaattcccactaactctgcaaatgaccctcaaaccttacacaggcacaaggctacaatgaagaaagcaagtaagttttggagtgactccttcagggcactaatccccaaaagtttataccagctcaggcttcagcaaactacaggcccacaggccatgtccagacaccacctggactctactgatccactagaaataaagtgattcagtaaaataaagtttcactgaaacacggctacacagtcatgctcatttgtttacaaattgtctatggctaagttgagtagttgccatacagaaaataaaactgaaaaaactatctggcccctaataggaaaagcttgctgtccctgagtacaaaaataaccaatagtaagaatgttcagaatcagctggctgagcagcagcaaaaaacaggatagctctcctctagaaactggtaggagcaagctttctgcctcataaacactttgctgtgtatacacatgtagtcttaattcatgagacataagatttgtcttttaaaaagctgacccaaatacaaaccatctccaatcagtttctcagacacaagtcagaatatgacattaaaatccagtgaattgcactgatattttctcttacagacaaacctagtctgtaggaaaataaattactctttctctctctcttttaatttaactaagggtcttgctctgttacccaggctggggtatagtagtacaatcataagctcactataacctggacctcctatgctcaagcaattctcttgtctgtggcctcccaagtagttgggactatagccacaagctaccatgtctggcttttttttttttttttctggtagagacaaggtcttgctaagttgccagggctggtctcaaactcctggcctcaagtgatcctcccatctccaactccccaaagtgctgggattataggtgtgagctaacacacctggccagaaaacaattttctctaatgaattaactgaaaagatttaccacacagcgtgtctatctttggaaacagcgctgccacaaggtacctggtggtgttcaagtacaaatccccctgacctgcaagaaatttcacctttaataatctttaagaaaggtcaaaagcattaacatgacagatgcccagggcacgagccaataaaaggaaaagttaactgggttatctctctcatatgtagttaaaacagcaaatgcttaatcatttaatttgtactgatgctgatttttttttttttttgagacagggacttcctttgtcacccaggccagagcgcagtggcgtgatcgtggctcactgcagcctcagcatcccaggttcaactgatccctctggcctcagcctcctaagcagctgggactagaggtgtgtgccaccatgcccagctaatttttatattatttatagtgacggggttttgccatgttgcccaggctggtctcgaactcctgaactcaagcaatccacccgctgcctcagcctcccaaagtgccaggattacaggtgtgagccactgtgcccagcccctgatgctaatttttaaatggacatttgaattctcaaagaaatttgtgttgcctcttgtcaaaccaggtcactgaaatgataacccacacaataagccaatgagaaggaaaaaatatatgggattggaaaacagaatgaaaatcaacattaaaattccataattaaaacacgcagatagaaaagaatttatctgacaacgtgctaagaaccccctgtcctgtgtttgctgtcatggggagggaagaatgtctgcagcacaggctttcccagtctgattcacagccctgttatatatgaatgtgcacactcgaaacaagatctgatctggacaatagtcaagtctctaaaagcaagggagttcaattaattttttaaataaacatttcactggattttttttttttaatgatcaatcctgttgacagttttcccgtccatcttccagaagaactcactactcaaccaactgcctggtattcagctgtgactgtgaggatggataactatatttccttaagaaatagcaggaaggtatctcatccaagcagaaaataagaccaacagttgtccaggtctcagtggttctgcatttcttcctaaaagagaaatatgtctctaaacatctctttcccgcctcatggggttgggggaagcaatatgctcagaaaaattttaactactccaggcagctgaataaaacaagctgaaaaccctagatgtgttctccacattactgtgacagaatgcaagtgtgtattcgaaagatttcctcgctggaattataaagcgtacagcaagccagcctgctgtactgccacctcgctcttgctcccagactccctcccatggactaagcaggaacgaacatacgagctgtgaatctggtaggggaaacaggaaacatccaaccaggaacacactggagagaagagaaaacagttaaccacctatgagaagatggcgctgattccagcaggtgacaggtgggacgtgaagggcattcccggccctccagcagaagcaacgtcacggagctgggtgctgggtgggttgcaccgttctgaggcagcacggttctctccaatgactctcacacaggaaccagacctgactctgtttcttccaggacggtcctccctcactccacagcctctcatggcagctggacacccaccagggctggattccacacacagaaaccacatccaatgctctgttactagaagtcgaccatctggatttcaaagacctctgtctctttctgtcctttgttaatcagtctcccttcccactcaaccctctcccctccatgccagagaaaaggatttttaaatctgatgagtttttcagggaagcagaaatgtgagattacactgttctttagcctcacctcatggttttgctacagagatcaacgtcttctaacacagctttgcccatactcttcctgaggctgaaccaaaaaatctttcatgaacagtactgtctccaccagcagaatgtaaatataccacagcactgacttcaaaacactgaagtagagagtcttaactctccttagacagaaggcagaaggctgcaaacatcccccagcagactgcaattgtgctgttccaactgacaagcccagtaagcactgcccatgacaggacctcctgcagaacttctcccagcctggcggacagcggggcaggggtcaccctcagaggctcgccttctctttgctccctagccatcacactacactgggatgagacacaacaagcacccaaatgacacagtgaccatttcttttggtcactgaggttcacgagatgggctgtttttctttttcaatcgaggagctgaaatcctaccagccacctaacaattaacaaccccaaccctgtccacggttaaaatcaacgaaaaaagcaaggccaacttcttgtataacttccttcatacgggaaaaacatcaagttcaacgtgtgttaatcaagtgtcaggtcaatgtaccacgcaaatatatttgatgttttttgctaaggccaatactaaactgttaaacacagagaatatgaggaaaaacaaggttaaaaaaagtgtatagatgtccaaccctcttttaataattccaaaaaaacacaaagctacttaggcaaaaataaatcacaaatctattcaggagcactgtaaaacggaagagaattatctaaagggattcaccggctactgactaattttaatatgaaatgcctcacaaatctccctgtgccaccaacaaatcaccagctgaggcaaatcccagataatgaaacattgtaagaagggctctttttaatagtttagcccatcaaggagtgagtattgattcttattttcagcagaaggagacagtcttatctccagccttacagctcagtgacaacatcagagaatttaatcacagagccttttctgccatgcaatccttaaactgtcacctaggattctgtgccattcctcatccatttgtagagaaactcctggtctcacagatgtgtctgcctacttaaaccacagtaaccatattatatggttggctgtgtcccacccaaatctgactttgaactgtaataatgcccacgtgccaaggacgggggctgggtggagataaatggatcacggcggcggtttccctcacactgttctcatggtagagaatacgtctcacaacatctgatggtttcataaatgggagtttccctgcacaaactctcttgtctgccaccatttaagatgtgcctttgcttctcctttgccttccaccatgattgtgaggcctacccagccacatggaactgtgagagtccattaaacctctttcctttataaaaatcacccagtctccgtatgtcttaattagtggcctgagaacagactaatacaccatagcagcacttcaagtcctacagattaaacacatctatctatcaattaccatttgccagctgtttttctttaagaattttttaacaattcatcagatatctttgtgcatttccaacttgtttgttaagaaatctgctcagtatcttaagagcagattgaaaatcataataatagctgtgccaattctctggacatctgtggatatttgtaatatatccaagacaatgccagtaacaaaagaaaaagccagggggaagtgatagcgaaatcagtcattatttccttatcctgacataggaagatcagaaagtcccccaccttccagagaaaattaaccaaatactaaagttagcagtaatattaattcaaaagtgtccctgcatctttaaatactaaaaaagtactcaaaacacagaaaaaattacactgaaaacaagccaatacttttttttttttttttttttttgagacagaatcttgctgtgtcacccaggctggagtgcagtggtgcaatctcggctcactgcaagctccgcctccagggttcacaccattctcctgcctcagcctcccgagtagctgggactacaggtgcccgccaccatgcccggctaattttttgtatttttagtagagacggggtttcaccgtgttagccaagatggtctctatctcctgaccttgtgatccgcctgcctcggtctcccaaacttttttttttttttttttttgagacagagtcttgctatgtcagccaggttggagtgcagtggtgtgatcttggcttgctgcaacctccaccttctgggttcaagcagttctcctgcctcagcctcccaagttgctgggattactagcgtgcgccaccatgcccggctgttttgtatttttagtagagatggggtttcaccatgtgggccaggctggtttccaactcctgacctccagtgacccaccctcctcagcctcccaaagtgctgggattacagggatgagccaccatgcctggccaagccaatactttttaattcaagtacaaatcaaactacatcactgagaggaatgttccccaatccagttacactaccctactatccattatcactgttgctgtgaataattagtacccccttccagggagtggggggtacagaccacgtgacagtgggtgtcactgtggtgacaagactgtttgagagtgggaggtgggagcaatcatttatgctggtaatttgccttaagatgttattcccaaacatccttccatgatcctttggattgagataccttaatcccaactgccttcatgtccaaggtcaccacacacacacacacacacacacacacacacacacacacacacacatcttccttccatgatcctttggattgagataccttaatcccaactgccatcatgtccaaggtcaacacacacacacacacacacacacacacacacacacacacaaacacacacacagacacacatcttctattagagagaaccgaaggcatttgacagctgcctttttaggtccttctgcctttccatccaaactatccatcgttaacaaggccctatggcagtgcagcagcgctctccattctaatcaggcatcgaagagaaacttcactgtctgtaggctgcaaccaagggcagcagcctcacaacaaaagtgcaccctttgtgtggcaatcatttacctgttgtaaaagcacagtacccttctctctaataaaaattcgaaaggccaaaaatcagcattacataatggccaaacataaagaaatgaaaagcagtctgggtgcggtggctcatgcctgtaatcccaacactttgggaggccgaagtgggtggattacaaggtcaagcgatcgagaccatcctggccaacatggtgaaaccccgtctctactaaaaatacaaaaaaatcagccaggcgtggtggcgggcgcctgtagtcccagctactcgggaggctgaggcaggagaatcacttgaacctgggaggtgaacgctgcagtgagctgagactgcgccactgcactccagcctggtgacaagagttagactccatctcaaaaaaaaaaaaaggaaaagaaaacataataaaacagcctcacgctatgttcactggaaaatttatatgcatgtatatgttttataagttatagaagcccataagaattccaatagttcaggggaaaaaaaaagaaaaaaaaaaaactaaacttgagctatataccgatgtctacccactaaaattactaaaactatagccaggaatacttgtttggtttcgtgcccctctcctttacaagggaggtagaaagcaaggtggagagacacccaacagtcacttccgttttaaaaaacaaaaacaaaaccaaaaaacttacacacagcagatttttctggctagtattggccaatctttctcttgacagtattaagtgctatcctttgtgttaacagtcccatgcatttaatttattggtttaaaagaaatatttcttcatctgattaaaaaaaaaatcaatctgacttttctgtcttgtaattaaaacaaactatcaatacaatggatagggggcaatttctctgaaccaggagctgttccagacactggggacaaaaaggtgaatgaaacacagccccttctcttaatctagctaagaggacagacacgtacagaggcatgatgtgagaatgatgctggctgacagtgcctctcaggcagaagcgagagatgactggaagtgggaggtggagaggagaggctcacttttatttttcatttcaatgtataccttaatatttttaacatccatttttggaattacatgttttacaacttcattaatagagttcagaggcacaagattttggctctaagtttacatataactaagtagtactaccataattatcacaagctggtaaataaacaagatggcctcaatgtgccaagggcacatttatgccaaacaaaggcaaagtcacttcatggcaagctgtatttacactgatggtttctgagtggcaataactgaaagaaaagcaacaggaaaaccgagtcattacaaggaatccagccgtctacacaaaccaggcaccatcccagcatccaagaacatgggccataaggaagcagtaacagttacatcacaagcggctacttatttcacaacatcatcgcccagtctattaaattaatgttggtagtcagaactttattggttttgtagtttggtttgaaattaatttataaactgccttttatagctgcattagggatataagcacacaaattatacctaatttgtgtattggggaagggaggaaattaagtaatatagaagaacacaaaaactatttttgaagtaaacatactcaagtttcaaaaacatgaaagaccctggaactgcatcagaagttccacatcctcaacgtaagcaacataaggaggagaccctgtctttacaaaaaattttaaaattagcagggcatggtggcccgtgcctgtagtcccagctactcaggaggttgagacagagaggccgaggctgtagtgagccctgaacatgccactgtactctaggtgggtgacaaagcgagaccctgtctcaaaaaaaaaaaaagaaaagaaaaaagaagaagttccacatgctgcaaaggacaagatcagatctacttttacactagttactggagttggggacaagccttcatttgctaatgctggccatccatcagaatctcctgagaagtgcttcaaaggagtatggattcctgggtttgactctggaacaaatgaatcagtattctcatcttacatgtgaagacagtgggactctgaaagattaagtcacctgatcgtacaactagtcaatgggtaaccaacatgattcaaaccgatactatgattttaacagtaaaaacgtgaggttttttaactacctccatgatctgggggaagggtatactgcagttccctgaactactctttcaacttctctgtaagtctgaaattattttcaaatagaaagttaaaaacaaaaactaaaaagaatagacagcaggctgagacgtgttaagaggtagaggtgggataggaaatggaaaaggatgaggcagaggcctctgaaaggagggcagaggcagagctccatctccacacagaggaggtcggctggttttcagttttgttttgttgtgggggaagaggaggtaccagtcaatagcaagctgaggagtttaaaaaaagaaggaaggaaggaaggaaggaagggagggagggagggagggagggaggaaggaaggaaggaaggaaggaaggaaggaaggaaggaaggaaggaaggaagtccacatatctgtaaggtgggcaataaaggaacgatctttctgtatttctctacattacaaattcaaactagcatttacgaacttgccaaaaaaaaacctgtttatgtttatagagaaatgcattctgaagtccaaacaactgaccacacaacaatttctaaacccttccactactacataaaacatctgcttctgtgctaaacttttgtaaggcacagtttctgcttcaagaaaatctgtgatgcttggaattgaggtttatcttactgaagaaaaatctgaagaaaagtgtttgccacccatacagctgataattttttgtaatcctaatggatcagtgggaaattgtaccacgaaatctcttgtcagtcaatataacaatgtctctaactaatttcagtaaagtgaaatctacagttattcccttgaaaaacaggacaaatcaactctttcccaacttttttcttttttttcccgcaagacggagtctcgctctgtcgcccaggttggggtgcgatggcatgatctcactgcaacctccacctccctgattcaagcaattctcctgcttcagcctcccaagtagctgggactacaggcacatgccaccatgccctgctaattttttgtatttttagtagagatgaggtttcatcgtgttatccagtatggtctcaatctcctgaccttgtgatccacctgcctcagcctcccaaagtgctgggattacagatgtgagccactgagcctggccttcccaacttactttaagaggtaactaaaggacgggtgcggtggctcacccctgtaatcccagggtgattggattgggaggctgaggcgggtggatcacctgaggtcaggacttcgagaccaccctggccaatgtggtaaaaccccatctctacaaaaaatacaaaaattagccaggtgtggtggcacgtgactgtaatctcagctacttgggaagctgaggcaggagaatcacctgaatccgggaggcaggtgatcatgccaaaatcatgccattgcactccatcctgggcaacagagcaagaccccatctccaaaaaaaaaaaaaaaaaaaaaaaaaacccctaaaaaaagtgataatagattatctccattactggcagcagaaaacaaatttaagtgttaaataccaaactttttttttttttttttgagacagcgtctcactctgtcacccaggctggaatacagtggcatgattatagcacactgcagcctcagcctcctgggctcaaacaatcctcccacctcagccctaaaagtagcagataacttttgaattttttgtagaaacaaggtctttctttgttgcccaggctggtctcaaacccctaggttcaagcaatcctccagtcttggccgcccaaagtgttgagattacaggcatgggttaccacacccagccaataccaaagttttacattacataggtgaagctagtatccaactattttccaccaattaccatgtaatatggttgaaattacacgacctttcaaacttccagatacaggtgacaaagaacatttttaatataatttctattttcaagatttaaaaattctatctacttttaatgtctacctagctgtcacctcaaaaaattcaagacagattctaaattttaaaaattttccaatttatgttccaggaaatttaagtgaaagggaggaaagctataactaaaatttactaatggctagtagtactaatatacatactttaaaaaaaaattaccaaggaataaatatttaggatgctccagagaaaaattatatctgtaagcagtttcaatctcctcattttatgaatgttttggttacttcagctattaagttttaatcaagctaaaaaataggcctttttccttccatcttaagaatgtcaatgggatgaggagggaaaagccaaaaggtgggaggaatagagtaacaaacttttaatcagctagcatgatttaaaggacacacacttctgtcctttaacacagcatgtttcttgaaaataggttactagttcctaaaaaagaacacaaaagctatttacaggctgaaaatctaagattttctattctcaaattttcatttagagaatacattttgggacaagagggaaaaactacattcattttaaggggataggaaaagtacctgatacgatctaatcgtaaaacatgagatcaaagataagaactgaaaatgcaacttccaggcaccaggcataataatttatatagactctaaaaaaggattaactttaagtgtattacttcaacttcactccagtccttagaaacatttaatatccttgggaaagagtaccatctcttcttccattgaaggccttgatatttatagaagatattgccggccagacgcagtggctcacaattgtaaccctaaccctttcagagactgaggcaggtgaattctttgagcccaagagttcgagaccagcctgggcaatgtggcaaagccccgtctctaaaaaaatttaaaaattagctgggtatggtggcaggcgcctgtattcccggctactcaggaggctgaggtaggaggatcatctgcgactgggaggttgaggctgcagtgagccattatcaggccactgcactccagcctgggtgacacagggagataccctgtctccaaaaaaaaaaaaaaaagatattcccatcaaaaaatactacgatatcctaaaaacaaagttagaataagtaaaaccacaagcttacttccatggcctgaaatgtctttggcaattctattgctaaaaataaagcctaggagaagccccgcatatttgtttttatatatatttctttttttttttttttttttttttttttttgagacggagtctcgctctgtcgtcgaggctgcagtgcagtggtgtgatcttggctcactgtaaccttgaacttctgagttcaagtaatcctcctgcctcagcctcccaagtagctggtactagagcctggtactatcacagccacacaacaccatatctggcttttttttttttttttttgagatggagtctggctctgttgcccaggcttgagtgcagtggtgtgatctcggctcactggaacctcttcctcctgagttcaagcgattctcctgcctcaacttcctaagtagctgagattacaggcgcccgccaccacgcctggctaatttttgtatttttagtagagacaaggttttgccatgttggccaggttggcctcgaactcctgacttcaagtgatccacccacctcggcctcccaaagcgctgggattataggtgtgagccaccacacccagcctaacgtttttgtttttgttttttttactttctgtagagacagggtctggtcagagactggtctgaccagttcaacctggtcttgaactcctggcctcaagcactcctctctcctcagcctcccaaggtgctgggattataggcatgagccaccacacccagctgttcagatattttttcaatcaactagtacggaacaagggctgtgccaagtggctttgtaatcttagcactttggggtactgacacaggaggatcccttgagtccaggagttcaagaccagcctgggcaacatagggagaccctgtctctacaaaaatttaaaaaatttttaaattttaggtagcatacacctatagtcctagctacatgagaagctgagaaaggagaatcacctgagcccaggaggttggggctgcagtgagccagaatggtgccactacacccctgcctgggtgacagagtgagaccctgtctgtaaaatcaacaaaaaaaccccaaaacatgaaacaccccaagaaaggcagggctgaaagtcctaacagtgcctgtaagtaataaagagcaatgcactatccctgaaagaacaagaagctcaataaaacttgcaaaggatcattaaatctaatatatgcctatggaaacaaaaaggcatttaaatcgtaggcagttataaaagcataggtttattgatatttgtgatctaaaaatgcggcttgatgccccttttggaaaaaagatgatgaatatgatgaaaagacagtcttaagaataaattgactgggcacagtggctcacgcctgtaatcccaacactttgggaacccaaggcgggaagatcacttgaggtcagtttgagaccagcctggccaacatggtgaaaccctgtctctactaaaaatacaaaaattaggccaggcatggtggctcattcctgtaatcccagcactttgggaggccgaggcaggagatcacctgaggtcaggagttcaagatcagcctggccaacatggtgaaaccctatctctactaaaaatacaaaaattagccaggtgtggtggcacacgcctgtaatctcagctactcaggaggctgaggcaagagaactgcttgaacccgggaggcggaggctgcagtgagttgagactgcaccactgctctccagcctgggcaaaagagcaagaccctgtctcccaaaaaaaaaaaaaaaggaataaattaactgacaattagcttttatggggacaactgctccaggtgaaaggaacagagctgaaagcaggcccagccgggttctctgatgccagtagcagtcagccttggcattataggtcagctgggtgctttcagaactttcttaatttgttacattataagtcgacagctagtaatcatctttcatttagggtagctggattaatcccaacatttgtattagcaattcttctgaaaatccagccatcttaatatctttcactaaaatcaaatataaaaagcaatctctcatgatctttatcgatggttatttttggcatacttaatggggagtatgccaaagcagggaagccacagtaaataatgaaaaagcaatatagcctctctaaacttctgcaccactaaaaaagcaaccagattggagttctttctaagcaacaagtaggtaacaaacgtaatacaatcagcatttccaaaagagcattttataataaattttcttttttaattcttaaatggtactatggtatcaagcatggaaagcactaatgttagaagtgatacttactaatggtaagtgccttacttcagcaaaaataactctattaacaccggtttgactgagttcaatcgagcctcccacctcagcctcctgagtagctgcaactgcagacacatgccaccacacccagataatttttcattttttcgcagagatgggatttcaccatgttgtccaggccagtcttgaactcctgagctcaagtgaccgaaccgccccagcctcccaaactgctggggattacaggcgtgagccatcatgcccgggctgatttgaggttttaaatgacaaacagcagaaccttcgctgtttttaatcttaacttttaaattattttcaacacctaagcaatctactgattagcatccatagtcaaaaagtaaagatcctctttccagaaaaatgtacatatatagaagattttgccagcagtttcaggatgttcacagaccctctaaaactttcaagagactttatggatttcagattaagaatgacgagaatttgggccgggcacagtggctcacgcctgtaatcccagcactttgggaggccgaggcgggcagatcacaaggtcagcagttcgagaccagcctggccaacatagtgaaaccctatctctactaaaaatacaaaacttagccaggcatggtggtggacgcctgtaatcccagctactccagaggctgaggcaggagaatcgcttgaacccgggaggcagaggtgcaatgagccaagaccgcaccattgcactccagacgttgctctgggcgacagagcaagactccatctcaaaaaacaaataaataaaaaaagaatgaccagaatttgtataattcaagtcttacaggataatagacaatgcttattgtatgcttgctatatgctaagtatggtgctaagaaatttaatgaattattttatttaatttttgcaacaaccctttgtcatagatagtattattattatacccatactacaagtgagaaaactaagagttagaaaggttaattaacatatcctatgttaccaagaaacatgtcaaaagaaaaaaagttccctaatggaaaatgcaaaacaaaaataatgatttaaaaaaaaaaaaaccatacaccgggcacggtggctcacatgtgtaatcccagcactttgggaggcctaggtggggggatcatgaggtcaggcagtcaagatcataccggctaacacagtgaaaccccatctctactaaaaatacaaaaaaaattgccaggtgtggtggaatgcacctgtagtcccagctactcgggaagctgaggcaggagaattgcttgaacccgggaggcggaggttgcagtgagctgagatcatgccactgcactccagcctgggtgacggagcaagactctgtctcaaaaaacaacaacaacaaaacatacacagccaggtacagtggctcacacctgtaatcccaacactttgggaagccaagatgagaggatcacttgaggtcaggagttcaagaccagcctggccaataaggcaaaaaacactgtctactaaaagtacaacaactagccaggtgtggtagcccacacctgtaaccccagctactcaggaggctgaggcaggagaatcgcttaaacccaagaggtggaggttgcagtgagccgagatcatgccactgcactccagcctgcatgacagggtgagactctgtctcaaaacaaaaacaacaacaacaaaaaaacactactcaaataaaacagttcaaaccacccctacaatactgtcctactatgtgtgttaaccactcaaaagaggtcaaacacacaaaaagacatggctaaaagaattaaaatgctaactaactaatatcctcactagtccttgatcttctagtgaggaagaggatgggtgcagccaacatgagtcctctgctgcagagccacacccttgacaatggagataaatgtgcacgtatgtccccttgaaaggttgcacctttcctgctttggctagagcctctgtcatggtgccacgtggtttctatgtaaatcagctggcgggtagaatcatttctgaccagtttagggaggttctgggcaatgttatctttgccttcctacctccctcactactccctccccaccactgaacacagtactttttactagaaaacatccaagctaacagattctcagtacaagtaaaaatgttgcctctccagcagatagaaaaatgaacagataagttaaaacttacaaaattaaatctgatgtttattccatcattagtgtagaaacacagatcacatatacctgaatatgcaaagaaagttaaattatgatgcaatcaatgctatcctataaaaactaaattaacaaaaatagtctattagggaagacatctggtgtatcatggcaagaaatgttaatgatattgtctgcaaccctgtaatcaattttttctcccagcagctctctcattacactgtattagatctgtgtgccttgcaggatttatgagaactccacatatggggaagctttgccaactggatctgattcagatccagctcaaatgactttggcagcacaaagcatcattaaagaacaatcaatacagttagctttatgtagcatcatcttgactgaaagaagatttatcctttcactacagaatctcttacacctacatataatgtacccaagtgctccaccagtcatgaacttatttaaatcatcagtagacacaaatatttttattgctaaaaaataaatactaatcattaattctaatataaaaagtttacaaaaaaattaatgttattatggggaagacttaaaatccattcagcaattcctgttgagtattacagtaaataaaagtattaataatagcatccacattgattaagaaaatatcagcctgaaagtaaaacctactttttagatatatgtggaaataagacatatcggtaaataagacatattggtaattgctaaaggctgaagctttagaagtaggtagtcacattgggaatctactaatttgtcccgtaagatgtcagtctttctctgggaattaaaattagacttttatctatactacactgggttctgtcttccactgtaagacagagaattccaaggtttccataatgtgaaacccccatccctttttttggtatgacccttgagtaattacatcagcaaatatgtaaacgtgttatgctgttgcaacaattactcctgatttggttacaattatcaatatatcatctctactgtcttggtcctcttcatcttacccatgaatggcggccctagccttctacttggaattttcaccatctttccccgttccacactgcaaactgctacagtcaatcttcttaagcagtggcctgcaagatggcttgcctagagtaaaaaagcttacacaggctctctactgcctattacacaaaatcttaactttgctaactttgaagatcctctataatctagccccatttatatctccacatctgcctcccaaaatccactaacctgtgctcttcagtgacgtcctgcgggtcatcttctcacaactcccagactcgtcagcctcactgcctgcgttgcttataaggacaggctgccatgtacacctggaaggctcctacactctgcctatccacttcttattgatgtatgaaaaacatacccagctcctcaaaacctacccaccctcacagaacttccccaagtgccacagcccatctggagcactttcttttctacgacccaagatattaatattctacactgcagctgaacaactcaccatatattgacagtatcttgcattgtgtgtgtctaagtgtgagagagcttgctatcctcttgtattatttgctaattcagtatgaactggggcaccacagtcacttctttacactgacgtcaatgtaactgcaactacacttctttcatattaacccactagtcattcagaataataaatactcgactttcagaaaacactaccattaaatcctccattaagtcctaccattacaggaaaaaaaaggaagacaagtgtgaactttcctaaaaaaagggagatgtactaaacgataataacccctatgatcacccacatgggtccctgtgttttaagggataaagcactacagatacttcatcctgctgcctcttacacatccctcaggaccaccactagtaacagaggaataaccaagggatagccgttaagaagtatagctacagcccgacccaagcctcttgaagggcatattctgcatctagcactggagaaaagcctcgctatttctgagcaataccctacaaaatgtcacccgagaggacaacacccaaaatagtttagattggtgggccatgagtcccaatgagcctggggaaacgcacattccacacttgagctcaaacttacccccttttttccccatttcagttgccaacatccatactcgctgctgattgccagctcctgctccttgcagcagcccagcatgctctctgctggtgccaaaatacccttccaccaaaccccgctaacttctggaactgtcctagaggggtaaggcaagtcccgtattttgcttcctctgtgcatgtacttgttactcctttaaaaacacatataatacagcacattttaaaaggggctctggggagggaggtaatattcctattttataccctatgggatataaaatactgatagcttttaaaaacgggattctccttacccctacaggccctctcccggcttcagaaagatgctgtggtggctgtgatgccaccggcagagagcatgctggggggtcacacaaagcaggagttggagatctgcaacaggcctgggagttgtggacctaaaaaagaaaacagttttaagttaacgtgcccaacgccccatcatgccctggttattaggggcacgcagcacacaagtcggtatctgcaaaaactctttagcagatgacctctgaaacctcagataatttgttctaccactaaagttaacctttttgcattaatcaaagctgttaccttatttcagtgtgaacaaacgtatgacccttctggctccacactttaatccaggtcctatcataaagcagtatggtgtgtgcccctcaaaataaccaagttaagatgtgagatagtgccaaagcacagttaacagcaacatgctatgcttataataaaaacagaaatgcaatggtgtcagatacaaccgtaaaatgaatcacaagtggacaaactgagctttcagaagagtttctaatgacagaagctagagacataagacatgtacttaataaggaaatagggcatttgggtggccaaagaaaggccctgccattttctcaaagttcaagtttaactgtataaagctgaaggcaaagtaaatagacaaaggccccaaaacagagggaaaaagacaatattcacatgagttataattttctccaaacgcccacaaggtgagtataatgaataggcacagagcataaagttccagaaagacattacttatttttataggcaaaactagtttagtatgtatcacgtgtctttttaaaattaactttgaaaacatttaaaaaccaggaaaaaaaagactatagagcaacttctgaaagctagcacagtatacctcagataacagtttgagtatgttccttttcaaatattttagacagcacataacatttttaaaccaatttcatgtggttttgaatgaactaaaaaaaatccataaaatcccaatacttatataagaacctgtcttacggttgtctaaaaattacagatgaacaaccttttaatattagatcattattagggtgtcctgttacacataattccctttgaaaagcaaagagcaattaacaactttctgtaaacaaagattttaatatatttcattatctatttttgtaagtctcttaagctccctacacatagacacacacacacacacacaaaacaaaacaaataccaggaaaataagctaatgttcagaatgttttatcatgatcattttcttttctttttctaaagatgaccatctagagtacatcctgggatctacactaaaatttctgtgcagtcagtctctgattctcatggcctcagtgatagtatagctgacagagtgtcagtagccacaaccttctcaccacacaccttctccccaccatcaccaacactgcaaactccaaattaaagattcaattgtgcacttgaatgtacagcatattcaatattttttgccagaagcatcaaaataaaaatggacttctggataatctcttccactaggaatatgactgcccaaaccactcaaatccttacattcaaattaagggttttaaatcaaaaacacctggtaaagcatttccagacactttggcattattttaaacatgcaaatagttcaagtaattattaaaacattttatatattttaaagaggcattttttcaaaacaagtcattgttctcacatacgaaatgagaaaactttgacagtatctgtttccctaatttttttttagtacttctaacaggtttttcttggactattgagttggttcttaatgcaagcatccatatatacatacaaattacaaatttccaattgaaaagaattaagtttgaacaagactttaccaatattcttgcacagtagatggctgcaaatatcagattgtctcaacctttcttaagctcctttaaaattagaatacctagagttttctgcattgaaaaaaatttcacatatagataacaattttagtaaataacattttcagaaatatattttatggaaatatatataattaaacaaaactttttcaatagtttcttagagtcccttgacccaagtaaattagaagaaaatgaattacccaacctcacagtagtagttaaacactaaaacttaaaatcccaagtgcccaaccctgactggcagccacgagtgaagacaaattgctggcaagctcagaaaatggggccagcaaaatgctgggattatttattcccaaggcctcattttgatttccacttatgttaataccactctgtccactagaggttgacatcagtatcatgcaaaaaggatgtggtcgttcaaaaaactttcaacaccattactccataattgtggcgggaggggagtatagatatacaacctcctctgactcagtacaccaaactcagggctaaagaattccatcttgcttgatgcggtggttcatgcctgtaatcccaacactttgggaggccgaggcgggcggatcacaaggtcaggagttcaagaccagcctggccaatgtagtgaaaccccgtctctactaagaatacaaaaacatagccgggggtggtggcaggtgtctgtaattccagctacttgggaggctgaggcaggagaatcgcttgaacccagaggcggaggctggaaagagctgagatcgtgccattgcactccagcctgggtgacaagagtgaaactctgtctcaaaaaaaaaaaaaagaattccatcctacctcttaactcttaaagaattaaacaaaattagaaatcacaaatttgtatgtgaaaaggccacttggtccttggatataatagctgaaaatacttgataacgaactttaatgtaaagtttttacttcattatccaacactacacaacaagtcacaaaggtgtaactgggtgatactgacctttttatatggtacaagccaagaaagtaaagagaagaaggagctatagaaagaaatactcaattttgcaggcctaccttgaaggactgtcaaaaacaaaaacagaaacaactgatgtgtcacacaggaacaaatcatcatagcgtaaggcatttttcataacacatggccttttctgggaggttcacacgtatactaggccctcatttatctttgctgaaagtcagtcatatggaaaactcaaaacaatataatgatgcctaaaaaatgttatgactttggctacattcattcaaattcgtgaagaaaacaagaaactgaattttcttcaagtattttaaaagaaataaagttttattatttctatacattacacactgcaggctaaccaaaggtaattgagtagacttctttggcttgtttaagagaatgttaatttgtgttgatgtatgcactgtatcaaacaactactactaaagttttttaaaaatacttatccagtgaatttattccagttaaatgttacttcattcagtattcaataaatacttactgtggacattacagccagccaatgtgctaagcacacaatatatacatcagtgaataaaaagcataaacctaaggtaccaactaaacatcaacatcacaatcagtgtcattctatggggcactggacactttgtaagtctgaccttttaatctaaaaacaatctacttggcaaggtaggtactttatatcccaacttcacaggtaactaaagaaagttaagaggcttaagtgtatttcctaaggtcaggaaagatggcaactgatggatggagtatgtgaactcagacaacctgatgtcaaagtccgcgctctgaacctgggcaatctaccatccctcatctcaatcccagaataacagatcctaaattctgaattagccatgttcaaattatgtgcaccttcctgcccaccccccaaccaaaaaagggctctaatgcaagatttacctccttttaaacgaatgcccattccgtgaatgtccatacactacaccttctgtgctaagtggtaacagccaagctgggactaaagaaatgcagtcgataatgcgtaagtctgataattaagtcactgtgtgtacacttgaatgtgtgcacaaagagtatgtgtaattaagtcgctacctgatgatatctcccagcatcatctatggtcctaataagacataattactcatcctcagtaagtttttattacaaaggaggagaaatagcttcttgttacttttaatccatttttaagaaaataaatttggtggagggcgggcaatctcaatggcaagtggaacctaagatgaagttaatttctctgcagcccttctgctgttgtactgtcagggaaggcatgaataaagggtagtgagtagcaaacaacttatgagtacagaccaggcataagagagaaattccaagtgtttttcctccaactgctcacatttgacaatgaaacaacgagagggatatggtattaaacgataaataacttggcccccacattcacagcaataatggaaatgtgcattctccaaggtaactagtagtatgcatccttagctattccacattcagaaccagcatttagaaagtaggctgttagggacacaaatgatacagcggcattctcatctatgtggagccgtaacaatatgtcgagcccagctaaccatcacctgagacactttaacatccctaactatcacccccaactctaaggaatctctgtatctggcttaactttaaggacaattttccaagttttaataaaacagttaaggaaccaaaatgaatcaatatcattaacccaaaatagtacttatagctacatatactacctagaaactcatttggtataagtaacagctgaaacacctatgtaactttaggaaaccaaaagcatgttttcctctactgtatgaatgacagcaatgcaagaatccacactgaatttccatggagactattacaggactgagtttgcttacttatctgtgaataaagaaaggtagtaactgctacaaggaactacttactatacaaggaactcctcagtgctatactgaatgaaaattagtgtctccatgaccttgttagcattctcggactccatgattacttccagatggcaaattatttgtattatacttcttaatgcctgggtttctataaaaatatgattttattgtttttcgtaaacaaacaaatcatttcttttagaactaaagtgaatgcccttcttgtcaatcctattcagaatgttctccaaagaagactgacatccaataatgccacaagttgtctgtccacttagaatctaagatcactgagggaatgaacaatattttatacttcttcagtctccctttaggtgctgagttccataaagaacacaaagcaggtattcagtaaatgcctgtggaagtccctgattatagctcaaaacatttctatttgcactctgtgatataatgctcctcaatgatattgactcattcagaacaaaaccctaaaagtaagtaagtcacatggtgacctataaaagctatgggagggcagcagaagggttggagatattaatctaggctctttccattgcaattcatgaagagccactcaagctagccaggtgagagctctttactcagagcgaacaggataatctaagaatcctgtgggaagaacatcagtgcagtgggacccaggagagtcaaggaagagacggctgtgcacacacttcccttggcagtctgctgctcttcccacagcttgcctgtcctctgcttttcccagtttcctaccctagcaagtgagcttgcctatgccagccctaaccttgctcttgtcattcaggtaattcttttatttttaatttttacagatatattaggggtaattcttgaattatctattcacctttcccctctactaactgcctcagtctctcagtttctcaactctaaattctaaaaatgaaatttggctcaattaatcttttcatgccaggccacaaggatcacagactgtcattccgtattactagtccttcaaaaagctaaataaagactttgccagctattttactatttagttcagaaatctacagtgcgaagcgacctttttaatcaacaatacttctttctcctgcttctaagtacgtgctgtccctaattctaccctgcctcttctgcttgcctgagctcctgcttttgactacttcttccataaatactttggtcagcgcattcaaacaaaatcagacctctccatttgtaaataagcccaatcaaatgaatacttcctaagagaatgaaagcttcctaatagaatacataattcctacctttaaaacctcagctcagttaggaacttaattgcttgatactatcatagcctccacctaccctgtggaagtgtgggctcgaaatacacctaccagtgtaggacggtggtgtccctatgtgttttgatggttgaatattaataaagcagaagccatggatcttatccccataggcaagataaccacacaacctatcatccacactcaagacatttttgagagtgaaaggggaggctgtttaatagtctggcaggacaacagacagggatcaggacatagaggcagctgtgttctataccacagactcgattctaagggaatgcagcagcagagtagagaagacaacccaggtccccacataaaatacaaagacccttctccttatctcataaagagctatttcatgaaatgtgacccaaggcccttggttcaataaactgccattattctagcctcggtgactggcggtagatgtctcctcctccccacgcctcacctcattagcttttgttatctttaacatcgtaatcgtacctactaatgtgtatcataacgggcattcacccagttacttttacagtgcccaaacatcctttatacacaaaatttcaccacggcaaagggattctcatttatagtataaacaatgaaacacatctctcagttataaccccaaaccaactttttattttatgattattaaaaagataaaatacctaattactcaacatttcaaagccatcgggtttttgtttctttcattgctccactagtcatgttatttgctgggagcaaaatcaaattcaatttcttcttcttcttaaaatcttgcagagaaacaaagcttatttccttctgctcatcttttacccttatagcttcagtaaactgaaggagaaaaaaatcttgatcattctcatctgattatcttttaataagtacagagaagtaagaaaataagaaagtggaaataactatatttattcccagagcaaatatttcatcatctgttgttcttacacaacaactatgaggatgtgctgaatacagaacctcaaacaaaaacatgagaaacagcagtgtgtgatttagaaaaaggtatctaaacatactgcaccctacttcccacactgtttttgtagacagctttaatgtgttgtattagaccaatactgacaacagaagctttagcttttattgctgttaataccctgagcaattaccgtaactcagcaggaacctctgcccagaacagcaactatcacattgtaatcagcatttcataagagatgctgttcaaacaggaaggcacctgctaatgtgcaaaaactgtacaaagggggctcaagatctaataggtaaaataaaaatatttacaattttatttcacagctatatatttttcacggtgcactgatgtttggtttagtaaaaatcacacaaaaagacaatgggcaggaaaagggcagtagcagcagccactaccaaaacaaaactcttcaggaataaggctacacccgtatttcaggtgtcagtgctgtatctgtttaaaaaaaaaaaaaaaaaaaaaaaaacacactttggaaggaaagatataataagtagcaaagacctctaaaaatggtttttaaaaattcatatagacataaaaactggatagaaagcatttgatttacaagattaaactgcaaggccaccttgcaatgcaaccaggaaagttaaaagccgcttatcaagaatagatccatcttagaagtaaatagcacatttgacttcatcttaaaacagtaagcatgcaataacttaagcaataactttttaacaaagaaaaataaaatgtgattttttttttttcttactgaatatactactttggtacttgggccattaaaaatgataaaaaacaaaggagatgcagagaaagatcttttcaaactacatttctttagactgaaatatcacatacaacatatgtcagaacacaaatattgtcaaattacaaagggtgttggaaataagagcattcacagatagtgatacacatctctacaaagctaaggaattacgaattctctaggcctaagagcacagacagtggttcacaatcttcaaagtactaggatcccttgtaagatcaaaatgtttcaaaagattcccaaatgatactacttcagtagtatttcaaataccaattgtttgaggaaaataacaaacaaacagtggttcccggctggcatggtagctcacgtttgtaatcccagcactttgggaggccaaagcaggcaaatcacttgaggtcagaagttggagaccagcctggccaacatggtgaaaccctgttctctgctaaaaatacaaaaaaaatcagccggttgtactggcacgcacctgtaatcccagctactcgggaggctgaggcaggagaatcacttgtttccgggaggcagaggctgcggtgagccaagactgcaccactgcactccagcctgggtgacagagcaagactctgtttcaaacaacaacaatgacaaatagtggttcttaactgtgtattgcttttaaataagtgaaatttttaaaaatcataaaagcatactgaaaacaggctgaaaaatcgttgtccagacgtgtgagatcaatttatttacatcaagcttagcatgtttatttgcagacctctgccaaatctctgcagacatccagggatccaaagcctaaagtgtgagaaccactggccctaaaaaagcgatttcataatgaggaacatcaacacttatatattcaggaagaatttttaatgagaaagtacagtagctatgtccttacttctgcaacacatgcactaaaactggaaagaaagtataacaactttaccacgcccaagccagacttctttcaaccgctaccccgggaaacccccacaacaatttcaacatcatatactccacacctgccgaaatattgaaggaagtgacaggtttccactggaaactattctctgacccgtttatattatttcccctactcatcaatttactgaatttactttacttcaggctcttaacaatggctgagaagaaacaagctacttcagaaattcaagggactatctgaaattgtcaaaagttactaaagggataaaaacttcagaaatattgtttacaatataagcattatgagagtaagtgttacaaagctgaaaagatggaactagtaaccctcatttcagtgctactgccacgaggcagttagcactcaaaaggtgaactggtaaccacgtcaacagcgatggaggaacaataagagatagccaatggaactggaaaaagagagaatacagagcagagtgaacagcacattaaaaacgcttaccagtttgaagtcttgaatgctacagatgaaatacggtgtgtttggcctccgactctcgatatacacacagtctttaaaagaaaaagaaattttaaaacaatggcatttacctttaaggaacaaagacagggcccataaagccactgcataaataaataaatgacaaagcacatatcttttattgtaaattttttccaaaagatgatattaaattgcaaatatctttaggctaaaggaaaactgccctttggttctttctgattatttttctaataatttaaagaatctgatgaagcctaaattattttcttcagagtccctgaagaagaaggggaggagtccaagggattatccatattcagatgaagacatttagataaaagaaaccgcttgctcaagatcacacatcaagatgaaatcttgagtatcttattcagatacatgttcacatgtcttcgaaaaagagaaacggctttgccacgtgctactatatttgtaataaatattttgtgaggaaataaatgaaatacgcaaagatgactagcttgaacatgctattacaatgaccttttcaactaatcaaaaagagaaagaaaactaatctcttacagacaatttgccattacattgtaccctaaacacattttattttctaactgtaaacaaaaacaatgccactaatcagagatggaataaagtaaaccaaattgcattttcttcagggaagaagggtgctttcttaaattacatttgacatggcagtggttggaaaataatttttgatgctctcaatgactggagtgtaaagcgttgcttttgtttgtttgtttgtttgttttgttttgttttgttttggctggtctcctctccaactcctgggctcaagcaatcctcccacctcagccacccgaagtgtcaggattacaggcatgagccaccacgcttggccaaggttgctttttaaaatgccatgttaagacacttaaataaaaagcaatgattttaaggaaagcagtggctatagagagagttaacctcctcctacccccatatcacaacctaagatcatcataaagcttaggtcaggaaagtctacgtattatttactgaaaagtaaaggcacagtcaatgaaatctaggaatagtgaccacaatgcctcattcattcattcattttgcatagacagggcctcactatgttgcccaggctagtctcaaactcttgggctgaagctatccccctgcctcggcctcccaaagtgctgtgattacatgcataaaccaccatggccagcccataatgccattcattttatacttcctctggacccttcagaatgagtgtatcttacaataattcagatgcttgacaacactggcaacttcctctattgtctcatttgtcttatgtgttgagagcgaagaaaaagcacagaagtagcaattgggagtcatcacaaaccccaacagaccaactaagatgatcaggaagaaagtcctcacaaatgagtacattccaagaaactttctgcagaacatcaggatctttgtacctacccaaaaggcactctagaaaaagaagaaatctcaatgccaactatttaggcattcagaattccccaactgatttctctactcaaagatggactcaacagagatttaatccctgaatccacgtaaaacagtagctcaggaatgaactgttgactaagctttccctatcttgttccaaggtcccagatgctaaataactgtgcttcagcattcaggcaacatcaacttaacatgctaatcatcttaagggacaagcaagagaattcttcccaccacagtagatcattctttcatactcctaccttggtattcaagtaaaaacagaagaaactcaattccctagataaaaactgtagctccaaattacacaattttggaacaacccaaagttcttagtttcctgtgtttcagtccctgttatacccactgccagcatttcagatctctagttatcaattatttactcaccttactcaactcaacatgccctctcctttctgttgcttcctacataccacatttcatgacattaacaccatcatagcctagctactgacagagcaggagcatcaccatcttggacaagcaccaccattttcaagttccccttgatcaaaaactgcctaaatccaacccaaagggcatcagcctaatggctaatgacatcatgaccataaaccacaaatgacatctccaaccacaaacattccaatcctaagataaacccctctctgaccacagacatgccagcccagagataacgtcccctctggctggagagatgtcagccccaaaacattccaaccccacaataaacttctcctccacacagaaacattccaagcctgtgataagctctcctgccctaaatccttaagtaatactcttggtctgtaatagacagtgctcctgaccaaaatcagccagaagcccctctccggtttattctccaaaatgagcctgtctttgactgttaagccacttttcgcatttctttcctcattctttaactcttacagctactactcactggcttcagaactaataggtccctttctaattaattgcttctaccttcttaaggctcaagtgacaaacttactgcattcaatggtctggtctcactccacaccccatcttcccctaggctgcattcactacaagaaaccccaactctgctcccagtctgcaaaactcttcttctctccttctactagcccctgatcacaccaaccttagaattagttatcagttccatatggagtaactcctcatggctcctctgtaactaaatggcaacacctcccttcttttacataacattaacaatttacattccttgtcaagttatttggcagtaaggtggtctgcactgtccactaacaattactatcaatcttgtaggctcagagaaatgtactcaattctaccttccccgtactcaccaaggactaatgtctgccattagtgtgggggttaaaaaaaataaaaaataaaaaataaggccaagtcaggtggatcacctgaggtcagttcaagaccagcctgaccaacatggtgaaaccccaactacactaaaaatacaaaaattagctgggtgtggtggcacacacctgtaatcccagctactcaggacttagaggcaggaggattgcttgaacccaggaggcggagatagcagtgagccgagatcacgccactgcactccagcctgggtgacagtgaaactgtctcaaaaaaaaaaaaaaacctgaaataaatgggagacacttggaaagcaaagactacgcatgtttttctttttacacaaagaaaagctttatttatatatactttaaataatccataggatcattactacacaccatcttactgtgagatataaagctaacttacatacaaaaaagctttccagaaaaaggaaaaagaacctatgttctttcatttcccgctgcaaagttacattcaagaaaagtgcctgtaaatacactaggatatagctctgttagagaaggaaggaaaggaacatgccggtatgtcaagagcagccaagcacatctgtttgcctaaacacttctcagcagttgtactggagctgcctcacacacctggcctgagaaatgctgccatgagggataagcatgagagagatcctcaaccggacatacggaatgaccactgttacttttccttagattaaaagccacctctttttgtttaaaaaacgaccatggcaactcaaactgatccaaagctatgaattcatatcagacagtccaatacacaaggttaataatctgtaaaatgggtgagtgcatcaagtgagctctatcagtactttgaaacacatatatgaaaaagttagagaagctcactgcaaaattaagtgacaaaacttacagttttgtaagccactggagggtggctgttaaaaaaaaaaactttacatacatagtcatgaaacacagaatggctaagactggagtaataagaactaaaaatgtttcacactatgtaaaacttgccataggaatggggaaaaaaatacactgctttgacctgatttgtctaattcatttttaaaatcaaagcatgacgaactattgtacagtcaaacttttctttataaccctctgacaaatattaggatgacccaacaaaaaataaacacaatttagaattcaagtctcacagaaaaaaattctactttatattactcttaaaaatattcaaaacaaggttcaattaaagccaaattctcatataaaaagcatttccccttggctcattaatcaagcagctatttaagaaaataatttatataaatgtttatagcacaaaaataaagtgctttatttgaaaagggaaagataagaacgtagtcaagagcaatgttaaaatctcagttggaatatatgcccagtaatcttttaaagccaaaatgatttggcaagattttcatgcaatttatgagtgcatgggatgtctgaagctggttataaaattggttttagtcagtaggatcaatgattctcaatctgaaaatctcccacggcccccaagcactgcatatacttctttttttattagaaagctagcagttctgaaagaactgcacaaagctgatgtgatccaccaaatgcataatgcacatcttcagaatcacccatgtaaaaacacgtatttaccagaattgagcaaacggttttggcagggcaagtatatatattttttaaatcttcaaatcagcatgcctgtaatgggccagaaaaatgagtgaggctattaccatcaatatcaattagtccaaacaacacatgataactaatgtgtctttactagggatgtctagaaatgaaaccatgggtctaggttgagacctactctcttaacacctaacctctgtctgggaatggatcacaggattaagtgacctcaaatccttgtgaacagggagcaacaaaatccgtaatttgggcaatgatactgaacagaggtatttctggctgtttctcacaacctcagcatagcttcatgtccaaagatctattgtgccatctgtaaacaacagagcatttgctaagctggggaaggaagtcagccaaaacgtgaaggcagattctcaaggcaaagaaggccctctctgctttttcaaccctcagcaaatcagcaggtttatgtaaatatagcaaaagcacagtcccctcaagggtaaaaatctcagtctgaagcattaggcagtgtgtcattatgaaacacaaagaacctgtcagcatcttttctgacagcctcctacagagcagagtggacacttacctcacccactaatttagcaagcagtgccacacacgccagtactaaaactgtggtcacaacatatataggcaatgctcagccactgctccacctcataaagaattttcctttccatcaatgtgtctccgcctattaatctttgaaataccttctcatccctttgcaaagcatggcagtgccactctgatataatttccaatagaaaaccccattgtaaaaagcacgcatgaacaaagactttctcacaaagagatttctcagagaccaagctgggtggcacagcggtgaaatgggaagttgactctcaggactgcaccgctcttctgctttctgtttctcctctacatgactcctccaccctcaatgcttggaggtaacagtcaatgaggtacagtatgttggtctaatattgcagaataaaaaatccacaagtatctctctacagttaaaacagatgtcctccattttccaagacacacaaagagtgtatatgttatgtgtgtgtgcatgctggaaacaacgctgaaatcccggtacccaaattccaatccagagtctctggcatactgcatgtcctccaacaaaccctcccagttctagtctcccaaaccataaaacagccaaacccatcaccattcctcaactctataaacaatgcactgttcttcatagtaaacactcaaaaattatatgaggaacaaacaaactaaacagagacatggtttaaaaaaaaaagaagagagagatcctagcaagaaagttgctacgctctatcaatatgaacaaaacaaatgctgtattctaatacttctttaggaaataactcgattgccaggtaacctactttagtttcctgccagaatcttttgctgtgaggggtactcatattgactgtaacactggagaatttaaaagggaaaaggactgctgctcaggaagctcaggtgacagcatcactggagccctggagttcaaagctgcagtgagctatgatccagccactgtactccaatctaggtgacagagtgagaccctgtcactcagtcatacatacatacgtacatatatacacacatacatacatggaaaaggaaacaaaaattgggaaaagtgcacctccataaatgaagccttcccagtccttacccttactctgtttatcaactgttatcaaaatcagctgcatcatcttaaggattctaaacttggtgggaaaagatcccagataacatatatctttgttcccctcttttttaaacataataattacattccatgtattgaaatgtctatagattcccaagtagtgctacaaagaaagcctcactaaacacagaacactaaatatttctagcaaacattcatctgtctttatcctcattgctaacaaggacagttaaataatgagaacaaacaagttgaggggaacaggtcataataaactaaaagggattttgttgaaaattcctacatttctcttttctcctttaaaagtcaggaaatctcccaatgtattgaaaacttaaaaactgatctcagataattatcttcccaactttaaaaaataatgctgggccaggcatggtggcacatgcctgtaattccagcactttgggaggccgaggcagaggactgcctgtgccctggagtttgaggttacaatgagctatgactgtaccaccactacactccagcctgggtgacagcatgaaaccttgtctcttaaaaaaataaaaaataacagtgatgtggatgttttggactaactgctgcagcatgaagcatgacccccgcttcccaaatcaatcatatgctatacaaacttgcgaactctgtggaacaagaaaaagcaaaattatcctgccagtagcagaaatcttattagttatactgatatgctaaatattagccatggttggacacttatattacccaagcaaagaacactgtaagcactctcatctccttattttactctgaaaacgttccttaaatagcaccccttgtcagctgtgttggttgagtccctatcatgaaagtgagtttagccaatgtaacatccaagttccagttaactgatgtggatctctatactagtataaaacttgtgttcatatacagcttatgtgctgtaagagaataaaagtaatccaaggggggaaatctattttaaaattcagtgacagccatctacctattgaagtagtgcttgtggcaccacagacacaaaggaagagaacttccaggcttcactcactctttctgtccccttgatacttcagagtatctaatttcctaaagcttaaaaatgcaggtgacaattctatcctcaatttaacgactcatcccctcccccaaaaaaactatgctctgaaccctattaagtagaggatgattactaatggaaatgctgacagatccttaacttaatgatgagaactgatatatggctgaaataatgtacattcaagaaatcaatgcaaagagtccaaacacttctagaacattgtgcccagtatttataggaaaacatcatcagtgacaggtaggctgggtgaaaattcttctctccccgtatggctgacaacaaacaaattgctcgtctgatcttctggtgtcacatcctgcagcgcagatttcaagcaacactgcttgctccttttcagaaaacaatgcactaggagcctgggctttacaataaatgattcaaccaatttacagggctcactggaaatacacaggacaattcacaatgcgtgtgttataattcttatttggcaaatgattttattataaactagtaatccattttctttacaggttttctgctactgtttaatagactgtcagtataatttagatttcatctatttaaactcattcaagcctggctcctgattgtacagtaaatggaacatatttctattcaaagaaattaatgacagttaactgtagtctgcagttctcagttttgtaaatgcaactgttccacagtccaagcatcaagctacaaaatttcccacaccaattattttcctgtacttcacaggcatcttctatttcttggaagccttccttgttaagactaatgtacatattcatttaatattctttcccattcaaatatttacctccaactttctagaaagttaggacttaaatacaaccaaaatgtcagaaaataaaagtttaattgccattctggaaagatgttctactaatacggatttttttaagttagcaaaattcaagattaaaagacatttttaaaaacatactcttggatgattttcttatatatttcaaatcagttacaatgtcaacattaagtgaaatttattaaaagtaggctaaatatcctatatggatttaaatatacaaacaaggcacatggcatatattaatatatactgaattgcttctgagattgatattctgtttaagagaaatttacttatggccaagcttagtggctcacacttataatcccaacacattgggaggtggaggcaggaggatcacttcaggtcagaagttcgagaccagcctgagcaacatagcaagactccatctctacaaaaaaaatttttttaaatagctgggcacggtggcaggcacctgcagtcccagctgcttaggaggttgaggtgggaggatcacttaagcccaggaggttgaggctgcagtgagctataatagcaccactgcgtgccagcctggggaacaaagcaagatcctgtctcttaaacacgcacgtgcgcacgcacacacacagacacacacacacacacacacacaaaaatgtacttctgagtgttagttactagaaatcacaacaatcccgtgagtgatttttcttcttgagtgattactctttcatggaagaggaaacatccacacagctgtgtaagacatgcttaaagcagaaaaaagcatgcaaagatgcaccttaaaagaaacttattggctgcgcacggtggctcaggcctgtaatcccagcactttgggaagccgaggcaggtggatcgtgtgagcccaggagttcgagaccaacctgggcaacgtggcaaaactctgtctctacaaaaagaaaaaaaaaattacccaggtgtgatggcgtgcacctgtggtcccagctactgaggaggctgaggtgggaggattgcttgaccacaggaggcagaagctacagtgaacagagatggtgccactgcactccagcctgagcaacagagtgagactctgtcaaagaaagaaaagaggaagagaaatgaacttatcaaatcaacacccaaacagtaataaggtaaggacccagaatttgctgccccaaactataaccaccagggtcacacaatgacagatgagaagtaaaggaaaaacagagacacccttttcattcagcaagcaaagtctgctcacctggctttgtttctcctctcctatagacacattcaatcaagaccaagccatgcccatcctcacgctgctgctactacaaccgctcttcccaaccaggtcctatcacaatcctgctcaaccttcaggacccaaatgccaccaacttacaacctgttctattcagttatctgcccactcaatgcctattactaacgtatcacttccctaaatgagagcaatttctccccacaaaatgaaggatcaagggctaaaatcctttctactttttttatcttgcagtaccataccactataaaacatcttctacaaagttgcaggcacagaagactgtgctcttgttttattggctgattgttaaaatgctactaatactatagctgacatctaatacacttcattaaattctaccagcttacttgaaatctattacagtgtcagcaggcttcaaatttaattgtttgctttagtttatataaacttgaaagggcaaatgaaacctgttccctgactctcgaaatctacccatacctactccttctctcccttaaatcgttgttgttttcattcgggtttttgttgtcattgctgttgtttgggcaggtcttacttcttctaattgaagtcaaagaataaagatttacttatttatttagagacggagtcttgctctgtcacccaggctggagtgcagtggcgcgatctcggttcactgcaagctccgcctcccaggttcaagccattctcctacctcagcctcatgagtagctgggactacaggtgcccaccaccacgcccggctaattttttgtatttttagtagagatgaggtttcactgtgttagccaggatggtcttgatctcccgacctcgtgatccgcctgcctcagcctctcaaagtgctgggattagaggcgtgagccaccgcgcctggcctgaataaagatactttaagaataatttaaaacatcaagacactttcctatgacaataaatattgagacctcatttttcctttaaagatcttcagcccactgtgaattacaaatgtcattttacaactattcaacaggtattttgaaaaaacaattccacctacacagtaatttccaatcatctatctccttatgattgcaatcatccatctccttatgatacagtgattttgctttctgaaatatacaatatactcaggataaaaagaattctagggttgtaagggattttgtctggtaatctgctgtccacctgtcactttcataatcaaaattagcacagatttcagcaaggtcatagtatttaaagtatctaaatgcttcttgattcctaaaatgagacgagagcttctgtttattgttcaagccctaagaggctctggatgctttctatatgaaaccgtattcacaacagacttcgttcaacaaatgagtgcagctgctctaggccaatataacacttaatgagagtgttgctttagcatgctccttttgtaatctgtaccttggaaaaattacgttttgaacatctgcgaagacaaaatgtatgagaactttgggaggaaaaattaagacttccccattctaaacaaagtatatgaaagaccctttgtcttataggcaagtcttgtcaaggttacattaaaaataaagaatatgaaggattctataaggaaaagaatcataatctcataaaaacattcacacacaaactgactgggcaccactaatgtgccacgtaagtgctggagatgctaaggcgaaaaaaacactgtccttcccttgacaagttcacaatctaatataagaggtagacatggaaacaactgtatgtcttcaattattattttattttatcttatcttatcttatcttatcttatcttattttattttattttattttatttttaagactgagtttcactcttgttgcccaggctggagtgcaatggcgcgatctcagctcaccgcaacctccgcctcccaggttcaagtgattctcgtgcctcagtctcccaagtagctgggaatgcaggcatgcaccacaacacccggctaattttgtatttttagtagagacagggtttcaccttgttggtcaggcaggtcttgaactcccaacctcaggtgatctacccacctcggcctcccaaagtgctgggattacaggcgtaagccaccgcacccggccatcttcaataattttaatggttacttattttttttgtctctgaaacagggactgctagctgggcccaatatttattctccccttcttccttattaagaaggctgggcatggtggcacatgcttgtagtcccacatactcaggaggctgaggtgggaggatctcttgagcccaggagtatgagcctgcagtgaactatgatgaccactgcactccagcctgggcaacagtgtgaatcctcatctcagaaacaaagaagcaataataataataacaataataatattaaataaaatataaaaaaataaaaaacatctggtacacagttggacacatggcctctcagaataaagacacttcccagcctctctaacagctaactcggtcatgcaacaaagtcctagccataaaatataagcagacctataatatttcaacttctggaaactgaatcctgaaaagtggaagccttgctcttcttactcttcctagtagtctgaaggcaaatgtgtgggctggaggtggagcaggagatagagcatgggagaacaaagagaatggaggccacatacaatggagtaacagaagctttgcctgtagctcaagaaccaagccgagaatccacacctcctgattcacagttcagtattttcggccactttactcaaatatttttataaattatttttaaatcggcaaaatatttaaatttcatccattaaatttaaatttctagatgccctagtggcatccagaacacatattttggggaaaatattctaatttttttaaacagaaaaagctaggaacagatgatgcattaaaaagtagaacacagagctcttaatttagaatgatcaaaataggttgattcaactattaccttctcctaggattatgaatcaacccctagcagcagacaaagtcacaacttcctcccctaagagactttacagtgaagtcaagttcctagcacgactctactataaggttgcacaagtaggaataagtgatgttaacctctcctgcagactgcctggcattctttgtgagggcaggtggatggtgtctgctggcactactcagtctcccctctttcatactccacttctgtacaggtttgatcaggacttgagagagaatacatgactgttcttccacaaaaatatagggactaccgacaaacaaattttctagaacattgtattatttataagagttaaagctgaccaaaatcatactatcctaaattctcagattataatctatattttacttcatattagaaggacgatatcctctgtgataccacagctctacctcctttccacacccttaacccggggaccaaaagaagagcacaaaaatatgtctgatccactcatggtggcaaagatttacccttcaaagattatacaaagtctcctgttctattgacacaacatttctccaatttctcttttttgttgacattaaagttacataaggacatttcttcaatttcaaaactacaaattcagtcacttttataggccaaagccctacgatacactagggctggttagaaagaagtgtgaaacctttaaatgtccagacatactaactcagtaattccattccttaggaaagtgagctgaaataaatttatcgatattcatcactgctgtttagaacggagaatatttggaaaacatcaagtccaacaacacagaactagttaaactgtggcatatagccattagcgtgtgagcatgtcatatttttttgtgccatggatgactttagcattctatatacctgttcttaaataaattttttaatgtacgaaagcaacatatattgaaatacttatcataatataaaaaacttgtaatatagtaatatgtgtacttttttgttgattcattaaataacaggatttactagaggtcactccctgaataacctccatactttcaaagtaatgtggaatataaacattattttgagatgttttttccatgtgatgtgataggagaatacctataatttatactgatgtcataggcactgccagtattgctgtgcttatcacctagcttcataaatgaagtgaatgctgaatgtcatttgacatttgatgaactggtaaaaataaagatgcaattttttcctcacccaagttcacaatcccttaaatttgccttggttggccatataccccaggttatgaatctcagcatgaatggcatacaaagcagccagaacagttcagatttacaagtggtggcatggaaataaattcaggacatgttaagaaccacatcacaaaactgcgaatagcttaactccatatacgttcactaagaaaactgaccatacaacaaatgttaacagtggttaagtagcttctattttaacttttacttgtccacatttttcaattttattccttgaaaatgtattatttgttcaccaaaaagggaaaatgcagaaggaaactcatagacgaaaaaaaatttttttttttttttttttttttttgagatggagtctcgctgtcgcctaggctggagtgcagtggcgcgaagctccgcctcccgtgttcatgccattctcttgcctcagccttctgagtagctgggactacaggcacccgccaacacgcccggctaattgtttgcatttttagtagagacagggtttcaccatgttggccaggatggtctcgatctcctgatctcattatcctcccatctcggcctcccaaagtgctgggattacaggcgtgagccaccgcgcccagccaagaaaaatttttgaagtctatagccaaatattataaatgtactcaaagggcaaaagaagaagcagtaagtaaattcaggggagagaacataaaaatggaccacgcttaatcattacagaagctaagttagagaaacaacactgaaaagggtgctggaaatccgtacgttcatgtatcagatgccacagcacttagaatcctgacaactgggagataatagaagtaaaacatatgacaaaactgatggtctctacaacagccagcctccaccaatcctgacctaaatgccaactgcaatctttaaaaagcttgcgctccatgatgccaaatatctattttggggatagctgctgcagacttcaaaatcattctggtttataaccctgaaagatagctccgagtttttctccaaccaaatatcttccagccagtccagagaataaactggaaatcaagtctccattgtctagttagaaactgagttatataactccttgcaaggaagaaatatcatctccccaagtctgagtgctaacagagtaattaccagatgcaaacttcaaaaccttatgtgtatttctatgctgtgaaatagtggtaattaaactactacttttcagttaaactgttcctaaggatgtaaaaatacagcataccaggtgagacctttttgtgacatttcctttccctctactaaaaaggaaaaattataattatacacagtattactaacattgccacaatcaatttggtaactgcacagtagctatgttttataataccagcacaatgggatggccaggacaagtaaagtctaaaaactaaatactgtctaataataatgatagcctgctttagagccaagttatacagagctttacaaatagagcccaaattaaaatgttaatgaaaaaattaagaataaaaagcacagctaggcatggtgatatgcacctgtgatcccagctacttgagaggctgaagtggggaggactgcttgagcctgggaggtggagggtacagtgagccagagattgcaccattgcactccaacctgggtgacagagtaagaccctgtctcagaaaaaaaaagaataaaaaacaacatattgaaattatgctaaaaatctgtatcataaactcactccactttccctttctaaaagagaggtataactataatcaaagctcccctcccaacttttttttttaaactatatgaatctctattgatcagtctacagtgagacactaacactccatctgtcaagtatcaacatctgtccaacacaaagaaagccagaacaatgcctgcagccttcaaagggatataaaactgtacctttgccttttaaagtttggtttatcattttacacattacactatcactctgtacataactgaaaaggcattccttgcaaacataactgaatagggaaatctagagatgtaagtcagaaaacacatttaggggttaaatgagtgaacagtggtggagtatctttcatatgtaacatatactatgatgcctaattagcttgagtacatttttaatggtgaaataatgaaaaagacttaaaggtactggatatttaatgcatatataatgacaaatagtcattatgtatgaattcaatggacttggtaaagtgactagaaatttacccatttccaggcatttaagcattcacttaaaagaatgaagtgactaacttaccttctcccatctatctctggtacttacaatacgcattataaaactcagactaatactaaggaaggagtaaaatagtgaagcatttatcctcactttttctagtatttagggtattcacatagctccaaagtaaaattcatgcacagccatctattctgcagtatttaaaactttttaaaacaacaaatcactcttgtccacatacattttaaagtaatttaacaaacaaaatacactgctccatcttcatagacagtatttttaattttggaaagtctggttttctcagctggtgaagctgtcagaataaatagaaggcaatatctggaaagatgacaaacacatgggtcaatgtcaaatacaagccaatctctgtcaagaaaaagagccaaattcctgcatttccatttaaattacgttatccaactcaaataccaccatgccacttcaaatgaaaatagtttccctttaaacagagctttttacaaaactgatagagtataacagattaaacaactctttcagcaattttcttagctactacaaagtaaggcatctatgtataattataataaggggaacatttaacaattaattgagccagctaaagctaaatctccagagcttaggagttcaaatgcttgctcactaagaaaaaaggacagaggattttaatataactgcaggaaatctcagtccaattagattctaggtaaatataaatcttgttgcactgtgattggaactctgtcacagtcctccggactgattttagcatctggcttggagagtcaaaccaaagaactccttgccccactgtttctctccacacactactgaattaatcaagtacctccaggttctgtgctgaacaaagaaggtcttctgaaggctgtcagcttgcttttacaaccaaccaataagactcacagaacatatcatacaactgtgaggcagtaacatctctgaaaatattcatgatttaccctagtttatcatggcgacaccttaagtaattcactgtctttcctcattcagaattagatcacgtgaggccaggagccatccccttttggagttttgataatggagacttagcaactatctttcaaaccaaggaggattaaaaattaagtaatcaaattaactagggtggcagttcacttccttaacttaatatacatcttttatctctgtgaagatctagaaaagtgcagaaggatttaacagaatcaaaagtatcgtattaacattttgggggtcaaaaaatcaggatatattttatattttaaataattttatagttgaaagaatttggtctgttagaaactggccttgtaaccccaatctaaaaccccaatctaaaacagtaacacttaacaaggattttaatataggactggccctttctgagttccgcacctatgtgcttgtgtatatacttatttaatccccatcacaattctggaggtaggtactcttatccccattttattgatgaaaagacaaaggcacagaggctgtcctctactccacgttaacccaccagcagtggggtactagattatgctgtcctttctccctctgtgtaactgattcagatttgtggtcaagatgaaacctaaggaagtttatgcacaacactgaaacatctaagagaattttttagggctgtttcacttgtaagtctaattaacttataagaagagttaagtacttgaggtttgtgttaatagactttttaaaaatagaaaccaaatattaaattagtaaaggcaagcttaaatgttgaagatattaacgagtttataaacaagactaatttgtaattcaaaatcccttaaaagtgattaaaatgtttaatttataaatgagatttataagctgaattttttaaaaagtgtaacagtgtccttcaatttgcaactttaacaaattgaatatcaatttttttaaacctaggtaaaccttctggacagtcatttctgcatataaatatcaatcttaaggactcttcccaaaaagtcctcccatcaactgctctgtgcacatgtctcctactcaactgctaaaggaagaacagctgagacaatgctacccaagagaggcacctagggctaagcactcacatctagcagctaactctgcctgcgctaataggtatctagggaatgagtaagtgcctagaatgtgctagacacttttccaagtacctgggatacatcggggaaaaagatccctgtcctgctggaaccaaccagcatggaaaaagacacacaacagaaatggaaatggaagatgccatgggtgtgagtgactgtgaaaggtggggggatccaagaattgaaaatcctagtgggctcaaacaatttctggatcaattggccccaggaaggtggaaagttaagaggtagaagagtggaatccatgagtaggtcatcaccaggctgcattcctgaatctgatcattaattgctcataaaaataccttcaaagattgacctttcaacatgtttttgctcattattgagcccaatttttaaacagccacctaaagaacatttctgtttcctctggaacacagtttttgaacacactgtggttcactgcttcttatgtagatatttctgctataacacaatatatgttactgggaagaccacatattcagcaaaaatgttcactaaaaatgaaaggacttacgtaaaatacagggtaaaaagcagactactcaaaccctatgcaactctgaaatcagatggctattttgttaaaaatcaatacttaagaaataagaaacccaggcagttacccaagagtggctgcacgctgccaaaggtgatactgagaatacatgaaaacaacagatgctggcttgaaggcaccaaaacaatgcagtaatctgggggtttttgtgaaggtgagcacagcagacagggcaacctgccacagagcataatgttagcgtgtgcctctctggggagggaaccccaggggacaggtgttcatttttcatttcattttcaatagaaatgagaaagctcctgctgatgcaacagccagagtgaaagtttaaattctcacctatttttttcctttcctgctaaaatacaatcccacattataccattaaagtatatattataattctattccatctggtcacactcctcttgcctagcaaaagttgcacatgaaccagcataaagtgcacattctattgacctcactgttctatttacttacctatcacacacaaagcaaaacaaactattgctaaatatccatatgcaataacaaggtctcatggccagcccacatctatttcccctaccaaactgcttcccaagctcattgtggggaataactttagccccatcatgtgcaggcttgggaaagcaatcaatccaggtttctgtctttttttatacaagacatgtgcatgcaattcaaggtagacatactatatttactcttttggaactgtgaatcttgagctgagtgacagcaaggacaggaagatcctgaagggccctattccagttatagcatgtggttggaacggtcagtagttcccgccaaccaagtacctgaacgctctcgttccaagtaggttttggaggcttttttccagcttcccaaccattatgggggaagcctgtaattatgtgagccactctaacaacacattgccctttgtgttatgtgatcaatgtacaccaccttgcatcaaaaaacttttcatgcatacaacatgcttgctttttattagatcatagaaaaatgtgtatttctctttcagttacttagggttcaaaatccagtaatcaccattagcctatgtattcttgaacaatttactactcaccttctcagcttacttcccatagtttccttatggactatgttgcccaggctagcctcaaacttctgggctcaagtgatcctgccaactcagtctcctgaggagctgggactacagatgctcaccactgtgcctgactagacatacaatttttggcaacaggagagctataaataattttaggagtaaaaggagaaaagagaaaaagagcaaagtaattatatcacttgcattttcgaagaaatcagtctatctcttcttttttcttccacacaggttatttgttttttgtattctcttcagggttttatgcaaatgtccgttcattcttggctttaaccagttctcacaggcccataccattttacaaaccagctgtgtgactttggcctccatgtctttgtttcctcatctgtacagcagggaaacaatgtctaggttgtataggaattttctaaggactagaaattacacactcaaagcaaatccagtagatagaaggtgctttaaaactggttgtcacccatgttgtagctcccttactatttacagccaagttcacagtgccctttgcaatcaggcactttagaagatgcaaattattcccaataatttggccagaatgtaattctgcagccacctctgttcttcttgaactgcatgcatcatattttaacgtcaaaatctcaagccatgaaatcacatattttttctctaatttttgatctgcctaatttgtagtctgccacaggtaagtgacaagcatgctgggtactaatcctctcacctcatgcaatggactcattttatatctgcgttagcttgaaaaagactgggaagcactaatgagtgattagtgactctcaaatctaaacgtgtgtttaaatcacctggacatcttattatataaaacatggattttgattcagcagattgggggcggaatctgagattctgcatttctaaccaactcccatgggatgccaatctgtggccaatgcttggtgcagagaacaactacagtacaggtttcatgatacttaatgatcctttccctataaaatcaaaaaagatatgattaatttgtctcaaatatcacttcccatttctctaattagaataactttagtattttctctttcctctatcctcacgaagtaataagtttttatgtgctaaagaattgtctttcacatacgtggaatttgaataacttcctaatatacatgaaaaggcaatcaactaaaagatgaaataaaatttcaaaagaaacagaagaaattaaaagttaactaatgtaatccataactaaaagttcactataatgtgactgaaaataagaactacattttcccaactgttccaaagacatacaactaagagaactgaggagatgtcactcaaatgtgaaacacctgaacctgagtctacctaacaacaaagctctcaaatgtgaaacacctgaacctgagtctacctaacaacaaagctcttcctgcctgttacaggatgagtttgtccttcccaaaattcgtatgttgaagtctttactcccaatagctcagaatgtgaccttattaaagaacaggtaaggccaggcacagtggctcatgcccgtaatctcaacactttgagatgctgaggcaagactcctggcttgagtccaggagttcaagaccagcctagacaacaaaacaagatcccttctctaaaaaaaaattagaaactagctgggcacagtgccgtgcacctgtagttccagctacttgagaggctgaggcaggaggaccacttgagctcgggagttcaaggcttcagtaagccgtgttcatgtcactgcactgttgtctggacaacagagtgagacccttccccgccactcaaaaaaaaacaaacaaacaaaaaaaaaacagggtcatcattgccaatgtaactaaaataaggacacatgaaaatataattacactgtaggtgtgattagttaacattaagtaaggtgagccctaatccaatatgactggcatccttacaaaaaggaaaaatgtagatagacacagagatatgtacacaaagagaatgctatgaaagatcaccactacgctgccacaaagcagcaaactactgtaagcaaggacagaggcttgaaacagatccttccctggtgccttcagaggtaacatgaggctgggtggagtggctcatgcctgaaatcccagcactttgggaggccaaggtgggcggatagtgtgagccaaggagttcaagatcagcctgggcaacatggcaaaaccttgtctctacaaaaaatacaattagccaggcatggtaatgcatgcctatagtccctgctactcaggagattgaggctgcagtgagcaatgatcatgccatagcacaccatcctgggcgaccctgtctcaaaaagaaatgaaaaagaggtaacacgaccctgccaacaccttgctgttggatgtgtggcctccagaactgtaagacaacatacctctgttgtttaagccactccatttgttatacagccacagcatccctaacatactaacacacagccacattgtgtttcctcccaaataagattaacgttgattaaataacattaaagatgattgtgcagataggcaactaggtcacagagggtctacagtgccaggttctgggaacaaacctgctggtgaacagggaatacactgaaaagctttaagcagattaataataggtctaataagtgcaactgaatttgtcacatgtcggaaaaaaaacattaagctctgcctaaagatgcctttatgctatgttacacaaaaatattcttgccattatcaataaaactaccccaccacaaaatatgaatgtttcaagaagacaccttcatttgcatgtcacatctattaatacctaaaattcttctaaatattgagatgtagataaaaagttacagatcaaatgagcttctatttaaaatatgtatgtgtgtgtgtgtgtgtgtgtgtgtgtgtgtgtgtgtcccctggaacaccaaataccacatcttggttttgttttattttgggaaggaaatgtttgtctgagtaattaattgccttacagaagctttcgatgattcagagaactaaggatgtgacaccacttgcagcctccacagacctcagtgaagacgcagtagctaaatgttaggaccatttgttaaaatatcggggactccctccccactttaaacagtaacttgattgaatggaaattttccatttagaaaatagttgcatgttatctttactttttcttttaaggcaaacttttactgaagtgtaatacatatacagagaagtgcaaaatgcagtaaattttcacagaacaagtccatgtaaccagtaccataaaacgtaacatggccagaacctgggggtccccttaatgttctgttccctgtacccatagggcaatctctctcctgacttcaaacaccaaagattagttgtggctgttttaaaattttctataaaaggaattatacagtattatgctcttctgtgtccactcaacatcatgtttcatgttgaaatcatttacctgtttttgcgatggggtctcactctgtaacccaggctgcagtgcagtggtgcaatcactgctcactgcagcctcaaccttccatgcttaagggatcctcccacctcagcctcccaagtagctgggactacaggagcacaccaccaagcccggctaacttttgtattttgagtagagacaaggtttcgccatgttgcccaagctggtcttgaactcctgggctcaatctacctacctacctccacctcccaaagttctggaattacagacgtgagccactgcacctgacctatagtcatttactttaaataggttttagaaataacgtatattccatttttattcaaactagatcctcaggtttcattttgcctagtttgaattttttccagcttaaattccatttgcatcaaaagaaaataacacttaagtgatcaaagtaaacaattctagtttccagggcatttttcctcaaaattgtcaaataaaatggtcaaatattttgcatcacctaagatttcacaaaccacaaacttatatacataaatacatgttttgcactatgttcatgaaagtagaaggaacacatattctaggactatagggtaaataggacaatcaaacaaaattatcagttaatatgacaaaatgttaaaaaattaatacatacttttgaaaaaaaaaatacatttcattatccaaatagcaagcaataccaatatgccaaaataaaaaaaaaaatctcacaataatatgaagttagttttttaaccagttctacctacaccagaaataaaggaatcaaatttcctagaacctaactgaaaacagtagaaagaaattaatatgccacctacagcaaactccagaaatcaatatcctatgctaaagaagcccagaaggaaaatctggctgcacacagctgtgtaataaatcaatttgttaccgtgacagtcatctcaaaacaggagtaatggctgacagacaacaaagaagttagatctgactcaaggacaatatacaatagagccccacaaggtttttgttttggttttatttttaaacaagtctgttaaatcattcattgggaagtaatacaaaacagacttccagaagtcttattctaattttaacatcatcaatgagtcaataattttttttaatgtttctagaaatttctttattcaacaaatattatggaatacaggctgggcgcggtggctctcacctgtaatcccagcagtttgggaggccgaggtgggcagatcacttgaggtcaggagttcgagaccagcctggccaacatggtgaaaccctgactctactaaaaacacaaaaattagccgggcgtggtgtcacacgcctgtaatcccagctactctcgaagatgaggcaggagaatcacttgaacccaggaggcggaggttgcagtgagctgagattgcaccactgcactccagcctgcatgacagggcaagactccgtctcaaaaaaaaaaaaaaaaatgtatatatattatggaatacacactatgtgtacactattgtcagtagatggcaggaattcaatgatgagtgggggaaaataagaattgctgtttttttggagaagggagacttattaatcctaataaaattattactgttctaagtgctagaagaaaagatacaaaaaaggctataacagtatttattaaggaaatgtatttgactaacctgggagaaaggcagtgacactggggtggcagagcttaagaaaagataagaattaagtgtgttaccgagacgagaagagcaagtgcaaaggccccgaggcaggcgggaacatgggcagtgtaagtaacaaaatctattatgctgagctcctaaggacaaaattaaggtaatcccagagtttagcagcaaaggtgaaaaagacctggttgtgacaacgcatgagattaaaccgtagtgataaattctaaataatatttaatttctccataagatcacatgcttctaaacactaaacaatttaaatatagcttgggacagaaaagtatgattatatgaaagcctacctttatcctcaaagtatccctgctatgctcattctcagtgacatttcgagaggtccctataatttatacttattctgagtagtaaaaccaattcagagatgtagaaagcaataaatatttgaaaaatcttaatttgtgctttatatcccatagaaataaatgagtattaaagatctattcacttggaagcggtggttcacgtctgtaatcccagcactttgggaggccaaggtgggtggatcacctgaggtcaggagttcgagaccagcctagccaatgtggtaaaaccctgtctctacaaaaaatacaaaaattaggccaggagcagtggctcacgcctgtaatcccagcactttaggaggccggggcgggcagatcacaaagtcaggagatcgagaccatcctagccaacatggtgaaaccccgtctctactaaaaacacaaaaattagctgggcatggtggcacgcgcctgtaatcccagctacttatgaggctgaggcaggagaatcgcttgaacccaggaggcggaggttgcagtgagccgagatcgcaccactgccctccagcctggcgacagagtgagactccatctcaaaaaaaaataaaaattaaattaaattaaataaataaataaataaaaataaattagctgggtgtagtgccacgtgcctgtaatcccagctactcaggaggctgaggcaggagaattgcttgaacccaggaggcagaggttgcagtgagttgagatctcacaactgcatcaagcctgggcaacaggctgagactacgtctcaaaaaaaaaaatctaccatttaaaaactagtaatttggccagatgcagtggctcatacctataaccccaagactttgggagatggaggcaggaggatcacttgaggccaggagttcaagaccagcctgaataacatagcaagaccccatctctacaaaaaaattgttaataggccaggtgtaagcacacctgtagtcctagctactcaagaggctgaggcaggagaagcaattgagcccaggagttcgaggatgtggttaactatgatcacgccactaccctccagtctgagcgacagagtgagactctctgtttttttttaagctagtaatccattgaagatatcctttacaacattctccacagatcctaagcttttaagatacaactaagcacacaggatctctgcaagtgggtgaggataatggtttttcatcactaacaaaggatgttattgtagtagtttatatcaagaaagtaaaagaccaggtgcagtggcttaggcctataatcccagcactttgggaagccaaggcaggaggatgacttgagcctgggaggtcaaggctgcagtgagctgtgatcataccactgacagcctggatgacagagcaataccctgtctcaaaagaaaaaaaaaaaaaatcaggaaacaaaacaaaggaaagaaaaaactcaacccccatctgggaatctaatcacagtactctgctggtttttttggttttgttttttgttttttaagagacagtcttgctctgtcacccaggctgtaatataatggcatgtagttcactgcagccttaaactcctggcctcaagtgatcctcccacctgagactctcaaagtgctgggattacaggtgtgagccaccttgcccagcccagcaccctacttctgattcttcagtttaagtaaccctaaagaacagacaatatttaacaaatactcatttagagaaaaagctgtttggagaaggcagctaactcagcttcaaatccatcaccaaaacgaaaggaaaccactgagaaggtcaaagacagtctccttaccaaatagacatccactggacctggcaggatgcaaaggcacagcccccactcaagcaaaagggtgcctcacatggagctgtcttgctctgggtgccacggaaatcttccaaaccatgtgtggcctttatagatccttcataatacacttagctttcagagacagcatacctttctcacatgtcacaaaggttttcagattcactgaaacactaccagcctccacaaatacatagttcttgcccaagcactttaagaaccattctgtaaataagtccttagcaatctcccttcacatattcttccagactcaagaagggaggtgtattagtccattctcacgctgctataaagaactgcctcagactgggttatttataaaggacagaggtttaattgatccacaattccacagggctggggaggccttaggaagcttacaattatggtggaaagagaaacaaacacatccttctcatatgacagtaagagagagaagggctgagcaaaggtggaaaggccccttataaaaccatcatatcctgtgagaactcactcactatcataagaacatgatggcggaaactgcccccatgattcatttatctccacctagtcccgaccttgacacgtggggattattacaattcaaggtgacatttgggtgaggacacacagccaaatcattatcaggaggacttcctataatcatagttcaccacgcccagctaatttgtaaaaatttcactacaatcatagagcactgcaaccttgacctcctgtgctcaagagatcctcccacttcagtctcacaagtagccgagactaaaagcacacgccactgtgcccagatccaagactgtttgtggtttgttggtttatttctatttttagggagatactcagcagaaacagggtgccacagtcccataaatgggaaaaatagccggtgtttttcatgttaaagaggtttccttaactgtcgggcttcttggagtcactaattctgactctctcatgagggagactgtacaggcagcattttccacacatatttgactactatttttggtgaaatgtccccactgacaccagaataacgttccatattataaatgctgagaaaggttagcattcaatactgcacaaggcagcttgccttttgacagtgatccaaactgtattaccacattaaattgttatcaagagaaaggataataaaaaagtaaatctttccttatactgaagttatcataatgtaatctatatctaaaagagttggccaggcgcgatggctcacgcctgtaatcccagcactttgggaggccgaggcgggtagatcacgaggtcaggagatcgagaccacggtgaaaccccgtctctactaaaaatacaaaatattagctgggcgcagtggtgggcgcctgtagtcccagctactggggaggctgaggcaggagaatggcgtgaacccgggaggcggagcttgcagtgagccaagatcgcgccactgcactccagcctaagcaacagagcgagactccacctcaaaaaaaaaaaaaaaaaaaaaagggttaacatgttttgttcctttcccatgatttagatgtgcgtacgccctaaacaagcaatctgtggtaactctgagagattcttcagtcactaagaaattcttactgcccaatagctgagtctacatcaaagataaatacagacagtactgtaacctacacacatcatttaatcgttacagcagatttctaactgctctaaaacctccactctgatcaatttatatcacacaaataccttctcagttaatctccaaccaagaaattgtagctgtgaatgcaaatttgtctgtattaagttctagcactgactttttttttttttgcgggggggaggggtggagacagggttttgctctgctgcacaggctgcagtgctatgatgtgaacggggcttactgcagccttgccctcctgagctcaagggattcttctacctcagcctcctgagtagctgggactgcagtctcatcacactcccagctaattttttactgttttgcagagatacggtctcactatgttgcccaggctggtctccacactactcaagcaatcctcccgccgcctcagcctctcaaagtgctgggattacagtcatgagccaccgtgcccagccccactgacatcttttgaaatttaaaaaactcctgtgtgggagaatgaaaatctggaacttgacgtgaagttcataacagtaacagcattcctcagtaaaatgattgttccagattatggacataacacagtgaagtattttaatctccttctcagaaaaacataaaaatgggcagctttaatctgctaattacatctcatacaaaattcatgtcactcttcaacagtaaaagtaactcaaacaaaatgatttcacctaggttttactggcttctgtaagaaaggatcttgttttgtttttttttgtttttttttttgagacagggtcttgctctgttgcccaggctagaaagcagtggtgcaatcatgcttcactacagcctcgacctcccagactcaagtgatgctcctgcctcagcctcctgaatagctgggactacaggtgtgtgccaccaggcccagctaatttgtaaaaattttttgtaaagatgggggtctcactacgttgcccaggctggtcttgaactcctgagctcaagcaatccttctgtctccgcctcccaaagtgctgggattacactgtgcccagcctaaaaaaggtgtcttaatacacacaatacatcaaatgaaaaggaaaggctttgctagtgttcaacaggttttgactcacttgtttccctgatctcatctaaaagttgagtctgtctttttttgagcaatgctataagccacaatatactggtgtgaccataatacattttctggaaaaccaagcaggttagatgactacttctattattgttgattagagagcctgaagctcaaatttttggaaaaggaagttagcaggagcaatacatctctgatcttcagggcttttttttttttctgagacggagactcgctctgttgcccaggctggagtgcagtggtgtgatctcggctgactgcaacctccacctcctgggttcaagcaattctcccgtctcagcctcccaagtagctgggattagaggtgcacaccaccgagcccagctaatttttgtatttttagtagagacagggtttcatcatgttggtcaggctggtctcgaactcctgacctcaggtcaccacccgcctcagcctcccaaagtgctagaattgcaggcgtgagccaccatgcctggcctaaaggccatttttaaaaagtacctctctagagtctggtcgatcctgtcccaaggtaaaatttcctgtttccaagaatcttaaggtttacttgtctccaccaagcagtcaattctgcagggtcaccacagtctcatttatgattgaagattaaaaagcaagcatgaattcaaaagacaaaaaaatactaagcagatggtccagttagagaacaagcagcacaggaaaataagaaaagaactcatgaatgcataaaccaggacacaagagcaaattaaggcagacacaagcaagaagtgggtgaacctaactgaccaaaagtgggtcacatgtttaccaaattaagtttcctactcttctagattccaagccttccttaaagtgtacaaagcgtatttatttcaccataatgccaagatcattcccccactgtaaacattggcaagacccaaacgtaaggctccttacctcctggtctgtagaccacatcatcttcagtgatgtaggatgttatctcaccggtatctgtcctttcataacgagacttttttttcggtggtttcttcttattcttcttcgtggactcctctgcggtggcactattgttgtcattgtcctcgtcttcactgtgatcactctcagcataatttttggctcctccttccaaggtacagctccggcgtggccttgaattctcactctctcttgctttgtctcttttctctctctctcggtcccggtctcggtcccggtccttctctttgtctttgtctttgtctttgtccgctgtcatgattcgccacgtgccttcttctgtcctctcacggctaggcctccgtgaaaggtagacagtaagcctgggcttcagtcttctgaatttctcactcaattccagggaaaatccaaccactccaacaaccccaacgtttcaaaaatgctaggagagaaaaaagaatggttttaacgctttttcatatttgtttcctaaaataatgttttgttaaatgaatctcttacttattcatgctttacacctaaaaacttcgcacaagccacaggagaaaaattaagtgttaaaatttaaaaactacagtttttggtctcagcaaatggtttggggttttttatgacaccaataataaaaactgtctgaatgcctaagagtaaactacacttcctccaccttacatgttttctcctttttaaagaaaaagcaaaccaataccctggtagacaacatataatgggtattattatacaaaaggagcttcataactcataatattaatttaaagaggaaagaatctgtagtaaaaattatttccaggccaggcactgcggctcatgccttgtaatcccagcattttgagaggccaagccagaaggaccacttgaagccaggagttcaagaccaaccctggcaacaaagcgagatcccatctccaacataaaataaaatatttctacctgaaaaaatagtaatagtttgcagcactgtcaaaaatgtctcaggataggccgggcgcggtggctcacgcctgtaatcccagcgctttgggaggccgaggaagatggatcacggggtcaggagatcaagatcatccttgctaatgtggtaaaaccctgtctctactaaaaaatacaacaaaaattagctgggtgtggtggcgggcgcctgtagtcccggctactcaggagtctgaggcaggagaatggcgtgaacccaggagacggagcttgtagtgagccgagattgtgccactgcacttcagcctgggcgacagagcgagagactccgtctcaaaaaaaaaaaaaaaagaagaagaaaagaaaaaaaagtctcaggatatcgcatagagcactatattctaaagatattttctggctacttctacaaactcccagaacttccttcaagaataaaaataatatttaactcaaacgaaagtgagagcttcagagcaagatttttccaccttcagttacattttacacatcttttcatcctaccattttcagttatgttccaaggaaaatgatctctctaaagatgtattactggccaggcgtggtggctcacacctgtaatcacagcactttgggaggccaaggcagggggatcacgtgaggtcagaagttcgagaccagcctggccaacgtggtgaaactctgtctctactaaacacacaaaaagtagctgggcacagtggcacacgcctatagtcccagctacttgggaggctgaggcaggagaatcgcttgaacctaggaggcagaggttacagtgagccgagatcacaccactgcactccagtctgggcaaaagactccatctcaataaagaaaagaaaatgtattgtctctgccttaacaaaacataacagcttccagaaacaagcttccatctttcgggaatattaagtggtttttacagtcttccagatttctactataaatggtatccctaataaagtactccccaaaaagaaacccaacaagaaaagtcttgaggtttttaagcgtctgcaatgggaaaagtgaatcccaaactccaagctaacacagttcttacagatattttatagcaggaaaaaattttgtctttctaagtcagttttggaatagacctaacaataaatttataaataaataatttatcttttgtttttcttatgatcttccccaataccctatctcacttattcaacaaatctttactaaatactatgtgccaagtgttagaactaaaaccacaatggaggagaaaactcatggtccttgttctcaatgctcaaatgcaacaaaaggaggcaaccgatcaatctaagaagcttctgtttctcatgcaactagggtgagaaaggaaacagtgcatataaacaaacaaaagattggtcctctttacttgacaaccacaaacaaatcagtttgcagttacatgcttcagatgcagagaaaattctctttggtcagccaggcatggtggctcatacctgtaatcccagcactttgggaggccgaggtgggcagatcacgaggtcaggaggtcgagaccatcctggctaacacggtgaaaccccatctctactaaaaatacaaaaaattagccgagcgtggtggtggacacctgtagtcccagctactcgggaggctgagttaggagaaccgcttgaacccaggtggcagaggttgcagtgagctgagatcgtgccactgcactccagcctgggcaacgagagagactccatctcaaaaaaaaaaaagaaagaaagaaagaaagaaaaaagaaaattctctttggtcatgctaaaaccataacaattaccatatattctctgcagcgctcttaggtcaaacctcttaccagaaaagacctcctcataagcatctcaaatatccttagacattcagcaaaatagaaagtatttagtctttggaagataggtgatgaaggagcaatcatgcatcataagctacattagaagaaggaacgcatgtagcacaaaactagattacttccttctatgtaagaaacatgctgtttcaaacaggatttccattttctaaacatatttcaagaaaaggaaaaattatcactgcctacaaaagttttgcccagatgaaccgtctgctaaacagatagtcataaactcccaagtcctggtaggctactagtgctagcaactgaaaatacagagacctactacttcctcgacaagtcttaagtttagagcatgaacgagccaatcatgaaagaaagaaaactatcaggccaggggcggtggctcatgcctgtcatcccagcactttgggaggctgaagcgggcggatcacctgaggtcaggcgttcgaagccatcctggccaagatggcgaaaccctgtctctactaaaaatacaaaaattagctgggtgcagtgatgggtgcctgtaatcccacctactcgggaggctgaggcaggagaatcgtatgaacccaggaagcggaggttgcaatgagccaagattgtgccatggcactccagcctgggagacaaagcgagactccgtctcaaaataaaaaacaaacaaaaaacgatcagctaacaccattgttaaaatgttcctctttgaccctgaaaactcatcagtgtctactaggagtccaaaaagaatgaaaagcttgggctgaaaacctctccactgcaactgcagtttcagacagaaacacttctgataactttaagaaaaaaaatcattctccctggggttaacaagataactgctccagaaaactgtgtagaaaacattttttcagcactcaaagagaaaaaatagtaagtccaaattgtacattcaacactactcactacaaaatcatacactgtttctatttacaaagaaaatagagttgtttctgccaaaagtgagcaagaaagttaaaaattcaagaaacaataaagatgtctataaaacaaaatccagtatatgtgtatatttataaaatcaatgttctgatttatctgaaagttggctctatttatatattacataatctgcatgttatattaatatattaaattatatgaataattaataccatatcatttatatattaatgacatatttatataaccaactttcagataagtatgaacattaataatctaagcaaaagtcaatccaattaccatttacatttggctctaaaatacagctcaatgggaatatatttttttcctctatgtttagcatatgaattataattcttctgcgccttagtgtacagtgatcaacacataccaatgatgtgacagataaagaaagggacccagagaggaaccagatggcactgagaaggagagttgtcacttcaatttgctagaaatgatctacaaagtagacgatacaacaacagcatctttattatagcaccatgaggtttacagagcaagtccctcatttgattcttccaactcatgaagtgaactggacagaagttgtcatcctcgctttacagtctacagaactcagaagagatcatctgcacaaggccacgcagccaatgggcacgaagtaggattccagtgcagctgtctcagagctcaaccctatctggcttgcacaggaactcctgctgcctgtgctgccaggatctccagctcttcacaggcaccaacttctcctacattcatccatgctgatgattcacgcagacagatttaagaaacacactcactctgcccccaaagctatttttctccagtcggaaagccaaaaacattgaaaatatctgtgtcaatcactacccaacccagtgaaacaggaaacacattataacatgctttaaataagaaaaggaagaaaatctaatgtagaatacatttcagatttacaacaagcttcagctactcagtgaacaaatgtcaagtgaatgcctattatgtgctatttacagctccaggtgttggtaaacagcagaaaactcaacataaaacccctgcccttatcttgagcttatgtgctcagcagtggagagagaccaccaacaaaaggcaccatacctaatgagaagatcttacatgggaaatctaagggggacacagtgttgcaggactgcaattttaaacaagatgttcagggaaggcctctctgagggggctttgaccctgagtaggagcattagagagaaagccaaggacacatgaagggaggtgattcctgaagaggggaaaaagtgcaaggtccagaagcaggaatgagccaggcccactcaagacacaggagaccagaggggcaggaatagcacaaaaagggggagagaggtcagagatgagttcagaggttgaaggggcagggggaggaggacctggatcctggcaggcctcatgggccagggaaaggactctggcttttactcaagtgaaatgaagttactcgaatgacactttagcagggatgtgagtagcaaagaaaggcatgatctgacttctgtttaccggagatcactctggccgctgataaaacctcaaggagcgcagtggggcacgatcaccccgggaagacaagcagcagctgggaagggctggggtagtagcaacagagaatggggaaagtctcatgtttgtatgttttaaaggtaagagtcaaataaataggatgtgctgataaacttgagaggtgagagagagagggaaaaaagaaaaaggacatctggcctggatggatgaagctgctgtttgagtttcatggggagaccaggaatttggctttgaatgtgttaagcttgatcaagaagcctagaaaatcacagagtcgaagttggcagaggtccaggctggagataataatttagtttttaaagccatgagactgaatgagatcacccaggaagtgagtacaactttttgacaaaacttttaaaactcatgagaacatttattgctcacgcttgagtgcagaggatattcaaaatagacttatgagttacacatttccaaaggcagtacccttaggactccttttaagtatattcctctcaatcatttcctgattagaagattatacatcatcatttcatcttaagtaagaatatgtgggcagttgccaaagctcaaaaaatggcagcttcacctatttagctgaaggccagattcctcacagttttttgatcctattagattccccacttaatctaggggaaagaatcaaagctttcagcagagccaatatacagaattactcttcattttaggttacttcagcctctacaaacaccatcttacctcttcaaaatgaagccaacaccacccccaaacatctcacactacttctcaaaaccaattcagacaaagcacaaaaatttcagtcatactcatggtccaaatctcatttaagagaaccacttcctggctggatacagcggctcatgcctataatcccagcactgtgggataacaaagtggagaaatcatttgaggcaaggaggcaatcatttgagaccaacctgggaaacacagcaagaccccatctttacaaaagaaaaataaatttaaaaattagctatgcgtggtggtgcagacctgtagtcctagctacttgggaggctgaggtgggaggtgggaggattgtttgaggccaagagttcaaggctacaatgggctgtgatcaccaccactgcactccagcctagggaacagagtgagaccctgtctcttaaaaaacaaaaaaagaaaaccacttcctgtcagtacttaagcttaaggaaggggcccaggacagaactggggatactggactgagaagccaagatccaagttcttagcactgccgcttgctgcactgccttgggcaaatcactctacctgtctgagtcgcagtttcattgctgtaaaaggggacaagacctacctatttcacaatgctgctgttgagaattacacaagtatactatatgtaaattgtacttatagattgcaaagtgctttacaaatgtaaaatatcaataatatgtatttatttcagtcatgatttacatctactatggtagataataagctatggaagatataaaggtagccaaaacacccctatcctcaagaaacttaactatttgggcgggggtaaaatctatccagttccatgattaagaaacaaatcatggagaattaactacaaatgaagaaaaaaattaaaaatatttcctcttgggtcatgtaaaattcacttatccatggaaatctgcccctccctcctgagttcccaatcctcaagctctactcatctccattgctcaagccaggctatttgttaggatgtttgacttttgactaaatacagtgagcgaagtcctccagttaattcttcctcactcaaccacagtaagacatacttatatttttcaaatgcctgaccatactctaggcatttttgcttagcacttagtctaccagacacatcctgaacacctctgtaatggacccactgctccaactgaatcttagcttacctacttcaagccatcatcatccctcatgcagatgaatacaactgctttctaacagatctttgtgactacaaaacattgtttgccttagccttcctcccatctgtcctccagtgcagccagccagccagcatatctgacgtcccaccactttttttcataatagctcaattcagatataattcacgttccatatgaatcaccatttaaagcatacaattcatttaaagcatacaatgcccactattccttttcaaagattatggggctgccccttcacctctccagcctcacctctcccctactgcttccacctccacccctcctgcatgctcctcctgctgcctcaagacactccttcagtccctagaacccaactgctgggaatactgttccccgcccctttgtctgtgtaccttctactgaccctcagagtctccagtgtttctgctctccaattccaggaggcctcccagacctacccagagtccagccttctctttgccccccaatcctgcctgtaaaatggccctcattgatcccactagtgttatcagttgttaacttacatcacttccccactaactgcaaagtccacaaaggcaaggaccatgtctaccatgtcatattccgtgaagcaactcccactcaagcaatttcctctctgcagcaaattcaggagagcattttcctcatcattatttgattattcagtagcagctgacaggggctggccacacaccctcctggaaggcctcttttcctttcactttctagacacgatcctctccagggcctatctaactgctccctccacttcttatactaggccaaccagtgtagaagttctgttggggcactccctcttttctcatcctctactttctacctggccaatctcatatataatgcgttcatcaccaatcagataccaggacacacaggaggatccacacaagtacatgtctaccagatctccccttcagcttcagacacatgtgaaaactgttcacctggggtctcttcttggatatctcaaaggtacctcaacatgcccaaaccaaaggcatactctgcgtgcaccaccatgcctggctaatttttaaaattttttgtagagacagggtctcattttgttgcccaggctagtcttgaactcctgggctcaagcaatcctcctgtctcctctctttaatccctacatcccatcatcaacaaattatctcattgttaccttataaatttctctcaaacttatacctccaaacacctccaacatcacaaatcttagttcaatctactagtatggctttcctggaccacttgaatcaggttcttgattagtctcttcaaatccactcctctgaactcctacaattattttactgtactgcagccagggtgttcctttaaaaaggctaatgacattatgtcaatccccactttacaatacgtcagtgactcttcactttggtacattaaaaatccaaatccttatcatgatctgcaaggtgcttatccttttttcgcttcatctctcagcactgtctttcagtctacacccagccacactatccctccctcagttcccagaacacaccacactccttcctacccagagtcctttgctaaggttcttcctaccctttgtaatgctcttcgtctggcctaggtgcctcctacccttccttcaagtcatagctcaacagcaacgtcctgaggatagctttcttgttcaaaacaggttaaattcccttcatagcattttccacaactgtaactttacatttacttgtgtgatttggttagcttctatctccacctcccagctagaagttccttgagggactgacccttgactgttttttgccctttgctgtatttccaattccttaactcactgcctggcacagaaagaggaataataaattatttcttcttccttcccaccctctcacacatacgttggatcagtaaagagggcattatgatgagacttgtgttggggaaagaaaatatttcatgaataaataactgaagaggtacttgatttggttcataaaccatgagtaggataaggagacgcaaagagaaggcgaaagacagtccaggtgggaggaacttcacttaagagagtgttcagttaaatagcagctacaggggaaaaagagcagtacaaagtaaatttaagtagagcaggtggaagggataatggaatgcccccaaaataataaagcagccaacactcactgggcacttaatatgcactaagcactttacacatgttaactcatttaatcttcactataacaaaggtgacaatgtaatttatgatccaaactggatacatctgagagagaaaaaagacacaacaaataaccatgcaggaaaaacatatgaaagccaggtcatatatcctagctatacccttattcagtcagtactactgttatgtatatcttatcaatgcaaaagtaagcactgagaggctgagcaagttgaccaaactcacacaactatgtgtgagacctaggatatgaacccaagcagctgactccagagcctatatgcttaaccacaaagccatcctgccttaaatgacatggccttaaaagccgagttatccaatacagtaggttaagtgaaaaaggtgctgccaggctactgagatgaaaagagcagtctaggaacattcatcttatctggcagtaggagatgttttccaccaagagttgttagtgtcggccaaacaaacttactttcaaatccatattctctgagagcctaagtaaggaaccgaggtacctcaagtacttttgcctgtgccatttctgcatttattgtgtatccaaaaaatgtgttagcatcctcctttaggaacacaaggcaaggagacagtccacgtgtggaagacctacatgaacatcttactctgctagccctgcctccaagagaagcagctgcagccagcatgcagcagaaaaccaaacaggcaccctacagctgggcgacttgcttccaaagggaaatcaattttcctttcctgttgcctttcatatcaacatgcctgggaaagaagacgtaatggcttttgctctggaaagggaaatgtcactctaacacttgtattcactgaataagaagtaaggcattctcataaacagtaacctgatgtagagaatacttcaaaatatgccagagaattgcagatgaagctgcaagatatcactgaaatatgaagtcagcagatctgcaaactcagacagaaataaaacagctttttatctgaaagttatgtggtattgagagtttttccatgttttaaagttcttccacctgacccaaaccaaccacataagcaaagagctacatatacccctgcacgattctctacctctgaggttaatgagtaaactcaatcaatcctgctaagagtttatatactcattctcagaatatacggcttatttaaggaacctaaataactgcaatgggatgcccaggtcaaattcaaagagcagcctttgtggtatcagagcagaaggcagcaaaaaataaaccctttaatgaggactgggtttaatgctgatagtagcacttcctcatctcctttgagctttggggaaacaactgagagaactaagattaaaagactctaataaataaggcttctcaatttcttccaaaaagacatactaataacaaaacacaagaccactgcagagggtgcaaaagtacccaaaacagcaaaactcaaggctacaattaacaacccaattaaaaccaagtaagaaacgatatataatctttattatttgaagcaaaaattcccaaagatgaggtgccccaggaggtttccaataaaaatttaaaatcctgtctttctttaaaaaacacacaaactcggctaggtgtggtggctcatgcctgtaatcccagcatgttcggggggccgaggcaggaggatcacctgaggtcaagaatttgagacgagcctggcccacatggcgaaatcccatctctactaaaaatacaaaaaattagctgggcatggtggcacgtgcctgtaattccagctacttgggaggctgaggcaggagaattgcttgaacctgagaggcagaggttgcagtgagccaagatggcgccactgcactccagcctgggcaacagagcaagactccgtctcaaaaaacaacaacaacaacaacaaaacccacacaaactcattcatacaaataactgctttcatatacttttaaatgtgaagcttttccaattatatacagttagcttgtacactgccaacagttgtgtctcttctactcagcaggttaagggaaatacactgctcactctaaacagggcttctcaactgaactacaattaacatttggggacagataattttttgttgtggggggctatcctgtgcattgtaggatatttcgcagcattcctggcctcaacccatacagattctaacaacgcaacccactgctccagtgagaactacaaaaatatctccagatactgccacatatcccctggggagcaaatatgcccacagttgagaactactgctttaaacaaattatttgcctattgcagagatttcaaagggttaagcatctgtgttgcttcatgcaaaattatgcttcactaatatgcaatccataaaacaccattacgaaaactatagtctgccatgttctttgttctctgaaataaactagacaaattcaaagtattgcttgaaacagtaattccacagatgtttgagggtgaattaggagaacataatcaaatatcctgaaaattctgttgtttactggcaagtcctgaagcttgctaggaacagaattactcataggtgacctgctctggtcatggggtcaagtggaagcttccgctgtcacacaactaaagagaaaacctggtgtccacaaatgccaagggcaagggaagccaaatgccgatgaaaccaaatccctgatcttgaaaggggaaaagaatccctaaactcactttcccaaagcatggctgtaaacagaaaaccaagtggaaaagataaatgcaaaacacaagcagatgggtaaataaagtgtagtatacatacacacaataaaatatccagcaataagaaatgaggtacagatatatgttacaacatgggtgaaccttgaaaacattatgctaaatgaaaagagccagtcacaaaagattagatactatatgattccacttgtaataaatgtacagaaaagacagatccatagggacagagagcagattacttgttgcctagggttgcaagggtaaatacagagtaactgctatggttatggggctgcttctgggaatgatgaaaatgccctaaaattgattgtggtgatagttgccagtatctgtgaatattctaaaatgcactaaactctgtgtgtgtgtgtgtgtgtgtgtgtgtgtgtgtgtgtgttgtgtttttaagacagggtctcactctgtcttctgtgaatattctaaaatgcactcaactctgtgtgtgtgtgtgtgtgtgtgtgtgtgtgtgtgtgtgtgtgtgtgtgtgtgttgtgtttttaagacagggtctcactctgtcacccaggctggagtgcagtggcatgcgtgatcacggctcactgcagccttgacctaccgggctcaagcaataccccccccaactcggcctctccagtagctgggattataggtgtatgccaccacacccggctaatttttttgtattctgcaaagatggggtttcactgtgttgcccaggctggtttcaaattcctgggctcaagcaatctgcttgccttgccctccagcaatccgcccgccttggcctccaaaatgctgggattacaggcataagccaccatgcccagccaattgtacactttaaataggtaaattatatgacatgtgaattatatctcaacaaagctgttttaaaaacaaacacacagcagcagcagcaactgaattacaaactaacaagaaaaagctcaggcttcactacagccaaacaaaggtgcatctggctacgaaattcacaaggatgagctttacctctgcaactgagaaaaaccaccttttaaagctgtaaaaacacagtcaattaaactagtagagttttatttcacgtaatgctgagaatgaaagagagccttctttggaccacggtaatctttaatatacaggaattcttggtcaggcttactatctctgtatagcatgttcaaaagtagattaagttggacagggtttctttcagtttgcaaagctctaagattcaaagtaatttgcaaccatggcacataagctctcagcgtgtgatgaaaggaaatgacagggtgaattttatatttaacttaatacaattacacttcacacctatagaaaaaaatcaaaagcattcaaaatgcacttctaatccacaggtacaaattatatcaaaggaaaaatggaaccacaaaactcatcggagcagctcttttaaacacttagaatctctaagtctaagataaaaggcaaactggctctgactaaaaacacaagtctcagtcaaaattcaatttgctgttttctatgtctgagccattctaactgggtgtgattctaggttgaccaaatgtattaaccctgctctctctgttaacctgatgtcattcaaaaagaaaagcagaagagccactagaacaactcaattaagatgccagcaactagtaactaaccagggagggcaggagaagtcccaggacctagaacataacacttaaatgtagttataacactgatcatcaaataaacatcaatctccagaggagattctgtcagttcccccattatttcagcaaatgtttactgagttcatactaggtggcctaggagctatgtccagaacacacacaatctctaacctcagagagattacaatctagtgggggagagagcagacaataaacaaacaagtagattactacagacacagtctgtaagttggccataagatgtgctatagaaaaaaaataaagctgggcaatggccatggagaggtcatcaatttaaggtaatcactggcaagggatcactggacctaaacgaagcaaggtgcaagttacatggttaaagtgggggaaagcattctgggcagagagaaaagcaagcacaaagttctgactcaggcagaagcatgcctggcatgtccaggcaacagcaaagggacatggtggctgaagcagtgagcgcaagaagaattggagatggagagatagctcagtacttactcaaataagggaaaagccatggtggagttttgcatagagaagtaacaatccgaggtacattttaacagactccctctggctccttaggaaacaactcaggcaaggtcgtagcagtgaaggtgttaagcagtggtcagattctagccctcagaagtggctaacagagcgcacgtggtgtgagaaaaaaggaggccaaggaagacaataaggtttaaatccaagcaactacagtcatttactgacatgcaaagagaacaaaaactgggaattctgttggaatgtattaagatgtatgtgttgagtggtcagaaagctctgggctagacctaaatctaggagtcctcagtgcacaagtactaataaccatggggctggatggtatcaaaacaaactactagggatgaaatattcaagatggcaaagaatgctttgcaatgaatattatggacaggccaaaaacgttctgtaaactgccaatgaagttgaaatggtagaatgatggaaagactacatgacgatgctctgaaaagaatacacttttttattcacagagaagccgtctacataggaaacgggtgcctatggacaacttctgtattaatgatgttaccaaatactgcatttaataaaatccaaaccgctgaagtccttcctggctgatttccacgctagaagacacataggatggaaacacctccccctgctgtttcacagggaaatacaccagctgtccaaatgacttttgccaggtccttctgggctaacgaattaaggaaggaaaaactatttgaaagattcttgccttgtaaattaattctaaaaagagttgtcagatttaaaaattagctttgttaacatttctgagggcctaaattaaaatttttaatgtccatgtgaaaagagaaaaagaaaacatgtagtgactaattatatgaatttaaaacaaagttcaactctagaaaaaatgaaatttaatgggttcgctagtgatatttagctggtaccacaatttgaatccgaaataattcaaatagagcaacatttatatgtctcaggaaggcacactgttttaaagtaagtgatatgaaaaggtaaaactggatccaaaatctgtgagcattatcatgagaaatatatgattacatctgtaagagaaaggggaaagctgctagatttagaaaaaacatctcagccgggcgtggtggctcatccctaaaattctatctagcactttgggaggctgaggcaggaggatcatcactacaggccaggagtttgagaccagcgtgggcaacatagcaagctcccatatctccacaaaaaataaataataatttttaaaaagaaaaaaagaataatctcactccggaaatatattttttgtttgtttttttgagtcagcgtctccctctgtcacccaggctgcgatgccaaggcatgatcatggctcactgcagcctccatgtcctaggctcaagcaatcctcccacctttacctccagagtagctgggactacaggtacgtatcaccacacctggctaagtttccttaatttctgtagagaagggatcttgctaggtttcccaggctagtctcaaactcctgagctcaagcagtcctcacaccatggcctcccaaaatcctgggctacaggtgtgagccaccatgctcagcctggaaatctaatttaaagagatcaaattatcaaattctggctaatgacagggaagatgtttccagcaacgagagaaaatgcagtattattccatcactttctatctactcctgtgcaaacacatttcttcactgcaagtggaaaaaggaaactatgaaaaagcaaagaatggcgcataccttcaaaaatgtcacttaaaattactactgcaggtgtcaacaataacctttatggttattcagcctcagatatacttggcttctggactcaatcaatatgtcaatcttattgtaacttcacactttacagtgtctccatgcagcaacagcaacaacaaaaaaaaactcaagaatatgccagcatccttgtatcagatgtttactaccaaacaaacaaacaaaatctttaatactatttgctcagggtaaaataccaattctatctgcaaaacaaacaaacaaagctctttaaatatttaatcagcagtaattagaatcggaggacagaatgactagaatcagatggagggaagaaaaggttttcatttctaccctcctgataaggaaaacagccatacattcaagaataaaataacttttatcatttagaggagcctaattcatttatttatttatttattttgagacagagtttcactctcgtcacccaggcagttcaatggcacgatctcagctcactgcaacctccacctcccaggttaaagcaattctcctgcctcagcctatcaagtagctgggattacaggtgcccgccaccacacccggctaatttttgtatttttagtacagacagggtttcaccacgttggccaggctggtctcgaactcctgacctcaggtgatccacctgcctcggcctcccaaagtgctgggattacaggcgtgagccactgtgcccagccaggagcttaatttattacaacaagctctcaaggatgatataatgaccccatatcacagacaatacactccagtcctgtttaccatgtaacatattctctaataaaaattcataccccctgacaatgcctacctgggaataaaaaagagaatgtcttcaagtctatgtcatgggttttcaacataaatatgattcccctctaaagcaagcatctgtcaagatcttggaaagaaggtcattactgagaaaagcatttatttgtgaaataaacaaagggctccaaaacagaagtgccaaaataagaaaaagtcaagtatcatgtttctgtaaaaaatggagtgaaaaagcttaaggctataatattttttggctggcgcagtggctcatgcctgtaatcgcagcactttgggagccaaggcaggtagatcactcgagcccaggagtttgagatcatggccaaatcccatctctacaaaaactacacaaattagctgggcacctggtggcaaaggcttataatcccagctactctagaggctgaggtgggtggctcacttgagcctgggaggttgaggcaacagtgagccataattgcaccactgcactccagcctgggcaacagaataagacctatctcaaaaataaatattttcatattaaaaatattcaaattattaaaattgtaatatttattctttggtattatttagctcccatttataacaaaacatacccaaattaaatctatagcaaatgtaaaatgcaagctttcattaaataatatgtgcaaagttgcagctttttccatagatcaatggcctaagagaggcctcatcttgacatttataaattattaacacaggcctgttaaatatcacaaggctaaaagagagcctttgatttatggacctggacattatcatcagaaggaaagtaatacatacttctttttcaggattaaaaaaacaaaaaaacagctacgtcttcagaggtttaccaaataagttttcttaaatatgaaaataactgaataggatcacacatacaaacaataactgtgataacaccaagcaggactgaaggaggcagagactccatttcttccgcaagccagcggatctcccaacaacacttgtactggtcttgtgttggcaaggcttaatcaataccacacagctatttctttctaagcttccatctcatatagtgtaaaataaagacagtagagcaactgctagattaaataaggtctgtattccaactgtttaaagtcaagtgccccaatgttgacttgacaaacttcctcaattttgttgtcaaggaaaaatacgcatttcatactccattttacatactcatacttcattttacaagcaaagtaatcatttcatactccacaaccacaaaaatatcagaagctcagtttggtgcccaacgtaagcatatactgaagaactctagtctctagtgacccttcagctcacctggaaaaaaggcaatatacactaccagagaacataaatcccaaaagcaactgacaaatgcaacctgggaggctgaaatgtaaatggagcacacagttaaaacagcattctccagagaaatcccctttctcacttcagcaaacagaggtcttctcaaaagctttcagtggaaaaactgccacttctgattaaagttaatttgatcaaatccatggggccctgggggaatgcacagatccctcttttctctcctccctgctttaccttgcacattctaaagtgactaacaatatgactaactgcctagagacgtgccattttcagcaactggtaaattacagtgtttttttaaatcagctggttatgatatgtgctgctttcttccctatatataggcctgtcactttcgatatagttttaaataaacaaatgacatgatatgatacagataaaaagcatttttagaatatcagagagtatcagaattgtgcagaaaaggcccagaatggtggctcatgcctgtaatcccaaacactttgggaggccaaagttggcagattgcttaagcccaggagttcaagaccaacctgggcaacgtcgcaaaaccccatctctacaaaaaaaaaaaaaaaaaaaaatacaaaaattagacaggcgtggtggcaagcacctgtggttccagctactcgggaggattagccaggtgtgttggtgggcacctgtaatcccagctacttgggaagctgaggaaggagaatcacttgaacttgggaggcagaggttgcagcgaactgagatcacaccactgcactccagcctgggcgacaagagcgaaactccgactcaaaatacatacatatatacatacatacatacatacatacatacatacatacatacatacatacaggttgagtatcccttatttgaaatgcttgggaccagagcagtttcaaattttaggtattttcagattttggaatacttgtattatacttactggttgagcatctcaaatcagaaaatctgaaatggtccaatgagcatttcttttgagcatcatcttagcacccaaaaagttttgaattttgaagcatttcagatatcgtatttttggatttgagatcctcaacttggactcttaaggtttacactatatattaccatataaagggtctatgaagtctatatgtaagaaaactgttcaacaagttagtaatcaacaaaattaaatacccacagtaaatttcccagtgtaattcatctccacattacaaaacttataaatgatcaatgccaagtctcttccttagaatagaatgtgagtcacagattagaataacacaaatcttacaatttaactgcacttaactatcttaggagttctcagtgggaatctgacatctgtcacatcaatatgtgccttatctactgatggggtttcagaaaagtaatccaaaaaagcccaactgacctttcttttcaccttagagactcagctcacatgaagaaccatgtaaagaatgattctgtcacaaaacattcttaaatggcaagctgaaggactaaagtaagtcacatatttttttacactaaaaaaaaaagaagaacctgacagcaatgagagaggtgtcacctcccaagtgtgacattaaatcaaaatgttcataaactaaactaccaagaaggaataccagaaactcaaggaaaaagagactcttaatgcctaaaaccaccttagggtcccaaggcaaaagtatctctgccctcaatgagccctcatcacaacccaggctccaaactagggacaaaggcagaatccctctgtggtccccagggagttccaaccacccacagggatgagtaccaaatagggcagttattgctggtcactaacttgaactggaggaaaacgtctgaggcagttctgtgaatctttttctccattcaaagcgccctcatttgtcctagacctcagttcctgctctctgcaaatgccacctacatttgtctcagtttttaatatcttcattcaaaaacttacaaagaaaaatcatgtcaggcccaatttcctccttcaagaaaccactcctccagtcctccctaaacagcctcccccttgactctccaatacaagccttctctacagatcccctgtgcttgagctcaccctttcacctttgctcatgcgtccttgccactagcccaagaggggtttttgataaatgcacaccattcacatccacttcaagtgtcagaaaagtaatttggctgggcatggtggctcccatctgtaatcccagcactatgggaggccaaggcaggtggatcccctgagatcaggagttcgagaccagcctggccaacatggtaaaaccctgtctctattaaaaatacaaaattagccaggcgtggtggcacgtgcctgtaatcccagctacttgggaggctgaggcagaactgcttaaacccgggaggcagaggttgcagtgagccgagatcacgccactgcactccagcctgggcgacagagtgagtctccgtctcaaaaaaaaaaaaaaagaaagaaagaaaagaaaaaaaaaaaaaaagaaattgttgatgcttccaacccatgccatgccattccttaattccttttgtaatcacacggtcagtatttcacaggttagcgttctaacataagaataacgtaaaaaccttattattcactaattcatatgtttcatgtaccatctcccctcacccttctctgtagggctccactgacagaacatacccttgtccttgctagttttgtaaacatgagctagtcaatttctctgtctagacttcagtttcttcactgacaaaatgaagataataatatgacgtatctcatggagttgtgaggaataagcaaaataatccatgcaaacttaccaatccacacaatgctagcagatacaagatgctcaataaacctcaacactgctgatgacaaaccatgttattcacatctttagaattccacagcacagaggcaagcaataaacattttgcagaaaacagtatctaaaacacatcaatctggtcccagaaaaactatttgtttgtattgcttaacaggaagagttgtttgttctactcaagaagcctgccttgactcctcatatccctccaaagggcctgcagccctccggaagcctggtttcccaagccaacccttctcaggctgcagaagcatggtctcctggttgctgttcagatccacgagaacaggaactgtgccacatttacctctgaaagtaatgaaatatttggtcatgaataaaatcaatttattagatttcatttttcattattcactaacaagctttcctcttttataatcaaagggcacagattcttaagtaaaaacaatatggttttcattaacgtttttcttaaatacttaaaaaaaacaggcgacttttgggtcttttgttttaaaaattaaattatggggccagacacagtagctcacgcctataatcctagcattttgggaggccaaggcgggcaatcccgaggtcaggagatcaaaaccatcctggctaacatggtgaaaccccatctctactaaaaatacaaaaaaaaaaaaaattagccaggcatggtggcacgcgcctgtagtccctactcgggaagctgaggcaggagaatcaggaaccgaatcgattgaacctgggaggcggaggttgcagggaggcggaggttgcagggaggcggaggttgcagtgagccgagatcgtaccactgcactctagcctgggcgacagagcgagactccatctccaaaaaaataaaaataaaaatacaaaaagtaaattataactctccaactcacatgctaatagtctttacattcccctttccattccaactttctctaaagaaaaaatgtagaaataatcatgtgtccacaaaaccacaaaatgtctagacataagagaatgctctcagatattattcctcttacagccatatgacccacttaagaactttaatctagggccatgctgtccagtatagtagtcactatctacatggctatttaaataaatttcaattaaataaaatttttaaaatgtactttctaggtcacactagccacatttcaggtgcttactagctacatgtggctagcagctaccacactggacagcacagacacagaacatttccattgccactgaaagttctattccacagtgctgatctaaagctaaatgtatggtaagtacaaatattaagattctcatttcctcaataagccactctcttttaatcaactctaatagcctcaagtacaagaatatgcataaacatgaacccaggggactttatctttgactctcacaaaggcaacagattacaattcttcttaggaaagacagtgagacagtcccatagcaatctaaggctttattcttccatttcttcagcaatttacacaacgtgacccgaggaaaaaagagcaagaaaccatttttttccactacctttatctatcatagtcacatctgccaagttttagaatcacaggttccattatcttacaccgtcagcactcttcctttataaattcccctctccacactgatcttctctgactcactcaacatattataccatcactctgaaatcagggcctagagtctctggcagacaggctatatgtaatgacagcctgggtacaatcttaagtctaccctccctcagaggatttcccaaccctatgcaattgtcatgtgggtaggcagaaggctgcacatttttcttcataataaaaacaaagcttcaatttctgtaaaatcaataaattacctccgtatttataatacaggatgatggcagagttctgttttctacaaaactagagcttttaggagcacatgttttcaatcacttatttttcaagaatgattgaaatatctccaagcgctccctgagaacttcactggtgtgatctgccactcaagttaattatcacaggctgcttatacacaggaagagaggaagcgggaaagaactcatgaccttgcacagggatgttttataaaattctctaaaatttaaactacacacgtttttccataatgcaacactatggtactgccttcaaaataatcatcatggaatagctgttttcttagtgatgtatggggaaggtggtagcgggtaggggtgcaagagattctgtacacataagaaaggcagtcacgtgacaccaatgtccttttcctatacacctggtggaaaatggagaaagccagaaaaacctgttcagtgattatcattctgattttttggttattacttcactaaaagaaaaaaaaatacatctgagtatatgcataagttgcatttctctggagtacttccttctgccctctgagtccaggtaccaatgatctctgaggggaaaggtcagccatctgccatgagaagaggccaaaatgtgggcaactattcctttctaaccaaagcacttctgaatctgagaaagcaagcaaacgtagtgtggtgtataaagcaaattctcgcccggaattctagcttgaatggagaggattccatagaaaatgtttccagaaggactctgacaacagaaagaagcaattcaagaacaaggacgtaatgccatatggatgggggaaagaaaggaaaagaaggaagacagaggaggagtctgagaaaatcttagttcttaagcatgagaatcagaactgtgggcttcagggtaaaaaggaaagagagactgaaaagtaacatctatgtttaaatgggtcctttagagaaaagaaagcactcagctaggattaaaggaaaagaattgtacctcctcaactccgtttcagagtataataaaccttaccaatttagaagctacacaccctttcacagttcacattcagctcagactgggagtcggaaattgaaaaacactatagcccgggagaaagagacaggtaaacatacaaaggactgagacaactgcttaccactaatatgggtcaatctcgcaggaatacttgcaaaaataaaaattaccaagtgccctctacgaatgctaaatacaggtcaaaatttccaatggctcaaccacctgagtggagagccggagaatgggagtcagaaagcatgtaaaaccatcgaggtcccgggaaacaaatttcctaggcttttaaaaccattcgtcttttctaacttacagaaaacgcaaactgaaaccattcagaaataaaacaaacggggcagggggcaggagagaaacggccaacaataagctactattctcctaccactttctcactggtgcaggcatctccaaaccaaaccactcagaaattttatatacaaggaataaatcataaggatctcatataggactattcatatactaaattatgtataataaccggggagtctttctcttaatatttttgtcaggagctctgaaaatgaggttttagaagccacagcatacctattcatcttaaaaggtaagatggcttgctttcagtttagctaagctttcatttctatcgtaaatatttgactttagaacactgaacaccatggcaaaaggcaaatatttacttagcttaattattccatatatactgttctacttcccctgtaaatacaaaatatgagttgaaacctcaaatcattaatacctaaatttggccacagattaaagtgtgctattaaacatctcaacaaattgagattaggtaacactttaagttctatatcacaagtcttaaactaaatcaaaaaaagtaaatgaaatttatctataatactagagatcaacaaagaaattaaactgaaataggtactaacgcaatcaccacagatttccacagatcccagtagaaataaagaagtttaatctttagttgaaattttaagagtagccattaaataagtaggacaggaatggaaggcgaaattgattcttttatatcctaatattcatattgagagatctgggcaaatatagtaagtcaacttggttctgggtttgagaaataagcacttaagtacaataaactccacaccagaaatatttttgtatattctactctcatttcaacataaccatgcaaagccctaatcagactaagggcttattttgatcataatctcctttactctgaaccctacctaccctgttttggctaagtgacagattttggccttcctctacccaggcttaccacccccaacctgtactgaagctctgtcgtatcatgagatgaagtctgcttagtaataggtgaaatgggacttgttcccttctttatattataggctgtctataacaaagtcaggctctatattcttcataatttcatgactaataatttcaactaaatcctatctcatttctttccatgatacaataaattcttcacatttcaatataaatctctttatcaataccacagcctttgaatttgcttaagccacacaaccaattcctgttctgaggtactatgaaaatattatgtggcttgttttattgtttaaatggaactttcctgtgggcactgttgttgttgtatgacattaattatctgtccagttcagttttacccaccataaactttctcaaaatgattgggaccatgtcttgttttatgagtgtatttcttgatttctttgacatttcagtgtccactagggactggtaataagccttccaatgtataggtggtaaaaattgttacctacacaataaaaataactatactaattcacgaacttctctatacctagaaatgtgaagcatgtaataatgtttaacaagaaatgccggctctagtactataatgcagaataaaaattaggcaagtgatgactcatacttcacaggtatgccagcctcaatcaggttttcaacccagtctttattagaaatgacaagtgattctttcgcatgccttaatttaatccaaagagcaatcaaggatctgagtgtgaaggtaacagattcaatgatgggaaatacaactactactcaatgctatacttcggtaaaataaacactggtatagcccaaagaccccaatcagaagttagactccataatttaccaactctgcctcactgtctttaccaaaaaaaaaaaaaaaaaaaaaaaagaatggaactcaaaaattctattagtataatcatcaagcttcaaaaaccaaatataacaaatgttacaaattatccatattttagatgccaaatgcctgaagaattaataacatcaaaaatggaatattcaaaggggagaggatgcaggcccagcctcacgccaagccatcctcctaggaatcctacaagtctataccacacatgtaccttcacccttttgttttccttttaatcccactcctccctccagacttgttccttcatcttttccccaattctctgcttgagaatggcataaaagggcaccacttagtagaatctaatcattctacttaaagactaaagaaatgaaatggctggaccctgctaaagagaaaagacggggagggatgggacacctttccaaaaacctcttcagagacacacagaaattctacaacccatccactgtagactgtctaagggaaaactgttccccacagttactggtgctgcttttaacagaataccaataaaggtataaaacacagaaaatattcatttatggcagagattaaaaacaaaatatatgcatttatatgactttatttttaaaaaataaattgaccaggcgcagtggctcaggtctgtaaacccagcactttgggaggccaaggcgggcggatcacctgaggtcaggagtttgaaaccaatctcaccaacatggcaaaaccccatctctactaaaaatacaaaataagccgggcagggtggggcatgcctgtaatctcagctactcaggagactgaggcaggagaattgcttgaacctgggaggtggaggttgcactgagccaaaatggcaccactgcactccagcccaggcaacaagggagaaactccatctcaaatcaatcaatcaatcaatcaagcacagctaccaactccttggggatattacaacctaatcttaattaaaaaataaattcacatcacaggttttccttcaaagccaggttaacaatactacttcacaggttaaatgccagtttttttggtttttaccactggccttaaatgattgcattaaaacacaccaaaaggatcttagtaattaaagatagatactaaacaaaatttccacttaaagtcatgctaaagcaggacaaatttttcatggttcaaggtgtgcaaaaagccttcattttaaagaatgcttcaatgaccaaatacattttcaatgaatcaatgtaccaaataataattaggtatattaaaatatccactttaattacaggaaattttgttagaaaagctagtatcatgaagccactgtcataaaagaagaaataatttatcattaaaaaaaatcctgggcataaacaaaaaaccccgccctcctctcatatgatggaatcaatgctgaaacacggaagcttataaaatcattttaccaactgttacagaagcactaagtatcagacacaggaaaagggggcttaaaaccaacatatttcaactagagatttaaaaacaaacaagaatgattaattaagcaataatcaagttcaaaagtatttggtgaaatagtaagtatagctcctacaaaggataatcaaacccaagcacaatctgatgcctgttaatccacctctccctatgagctgttaacccacctctccctatgagaagccttcctgtcaccaccatctttgcctcctgcaattgcaataaacaggaaacactaattggtcacctccagaagctaaataccagcaatgggtgggaaatccctttactcattcatccattcattcattcattcattcattccattcatttgagacaggatctcactctgtgatccaggctggagtgcagtgcacgatcatggctcactacagcctcaacctcctgggctcaagcaatcctcctgcttcagtcttccaagtaactgggaccacagacacgtgccaccacagccagctaatttttcaattttttgtagagacaaggtctcactatgttactcagggtggtctcaaactcctgggctcaagcaatcctctcttctaggctgcccaaagcactgggattataggagtgacataccacacccagcccaaatttggattttaaagaactaatttgatgcttccatagagaggaacttttaaactacacatttcctgattcaacagtttacctactacacacagaaaggctttccaggaagcattttatatttgctaaataacggtaagtaaaatattttaaagtcatccaagtttcaataacaattatcattacttccttactttgaaagctacaaccatatttccaagtattaaaacaacaaaatacaaataatcctaagaaatccacaataaagatttatctattaaggccgggcgcggtggctcacgcctgtaatcccagcactttaggaggccgaggtgggtggatcgcgaggtcaggagatctagaccatcctggctaacacggtgaaaccctgtctctactaaaaacacacacacaaaaaaacaaaaaaaatcagccgggtgtggtggcacgcccctgtagtcccagctactctactgtttagaatcgttttcaatgtccaaaaatgtgactgctttagagatgccaaataagactaatttaaataacctaagattgctccaattaccgctggtttttcaggtggtacaatgtataaaccaaagaaaagaagctggtgcataaaactcagctggctgaagaagttaaaaataaaactccacaatgatatgtggtttggggaaaaacatcagagttccatttagacatgttaagtgttaggtgcttactggacatgtgagtggagctatatcttctgagtggagatacaaggaaggcagctaagtaggtctggactaaagataacattttaaactctttaggtaatttttttttttttttttggaaacaaggtctcacatccatcacccaggctggagagcagtagcacgatctcagctcactgcagcctcgacttcccaagctcaggcaatcctcccacctcagactcccaagtagctgggactacagatgcacatcaccatgcctggctaatttattgtatttttagtagagacggggttttgccatgttgcccaggatggtcttgaactcctgggatcaagcaatccgctcgtcttggcctctcacggtgctaggattacaggtgtaagccactgtgtctagcctgcatttaggtaatttttaaagccatgcatcctagggaattacgtagaaattcaacaaatatttatcagacacctattatgtgctggagatagagcagtaaaccaaagagtcaaaattctctgtcattcaggactttacattctggtggaagaaacaagacaataagcaataaaaataaagatgtagccgggcacggtggctcatgcctgtaatcccagcactttgggaggccaaggcgggtggatcacctgaggtcaggagttcaagaccagcctggccaacatggtgaaaccccatctccactaaaaatacaaaaattagctgggtgtggtggtgggtgcctgtaatctcagctacttgggaggctgaggcagcaggatcacttgaacccgggaggtggcggttgcagtaaactgagattacgccattgtactgcagcctaggcgacaagagcgaaactcagtctcaaaaaaaaaataaaggtgtagtttgtgatgaagacaagtactctaggggaaaacagagcagagtaaggacaaagtagagccgagactgagggtcaaggtaggcctctcactgagactcgaaagcgggacggtgagctacagatatttggagaaacatatcccaggcagaaggaacagtcagtgcagaggccttagtgatcatcacaagggcagtttccctggagcaacaacggatggatttaagaggaaaggagaactggagatctgggtacagaaaactcttgttgagaagtttttctgcaaaggaagcagagaaatcagcaatagctggcagagtaagtgggatccaaatacgggagtttgtatctgttttaagattggagaaaagcggcatgtttgtatgctgctgggaaagatccagcagagaatgaaacatcaacattatgagagacaggaaattactatgtgagagggcacgggtggcgcctcagagagttccctgaacagctggtctatacacaagcagtggggaaagcacaggatgccctggaaggtggcaagatgtggtaggagtctgcagaagggctcttaagactgttctgattttctcatgcaagtaggaagcccaccatgaggccaaggaggaagtataaaaggacaatgtatgaaacaggcatctaagaaactgcataagtgaatggacttgcccaggagccttaaagctccatttgacgtttattaaccaattgggaattaacactgagaaactcaccaaatctgagacataaaggctgactctgactttctactataaataaaaaattctctaacaaactgctgaaaatggtcagtgtctaacatatttgaatatacaatacttggggagagtcgtaatttctccaaataatgtgttgaaagagattacatcccattttcacaccatattcataattgcttcgtcatacataacttgaagggagtcatcagtcattgaaggatttaataaccttaagctgaagttaactcccttatgtcagaccacagtaaacaaaagcagggttttaatgccttaagccaattatatattgcaaagtaaaacatcttatattcttattcacagaagtacaaatttagttttagtttagttatattcttattcacagaagtacaaatttacacaaaaagattatctaacagcattcaattaatcaccaagaactgccatataaaaatctatttctaataatatggtcctggttgcacaactctatgaacacagatggtccccaacttaagagggtctaacatacgattttttcaaattaacaacagtccaaaagtgatacgcattcagtggaaaacatactctaggtaaccacacaactattccatttttcactttcagttcagggcacagcgactaacgcctataatctcaacactttggaaggccaagtcaggaggatcgcttgaaccaacgagtttgagaggagcctggagaacatgagacccctatctctacaaaaaatttaaggccaggcatggtggctcatgcctgtaatcccaacactttgggaggcaaaggcggatgacctgaactcaggagtcgaagaccagcctgggtaacatggtgaaaccccgtctctactaaaaatacaaaaatcagctgggcgcagcacctgctattgtaatcctagctacttgggaggctgaggcagaagaatcccttgaacccaggaggtggaggttgcagtgagccaaaattgtaccactgcactccagcctgggcaaaagagtaagactccatctcaaaaaaaaaaaaattaaaattaaaattaaaaaattagccaggcatagtggcacacacctgtagcctcccagctactccagaagctaaggtgggaggataacttgagcatgggagctatgatcgtgccactgggcaaaacatctatctgtctgtccatttgtccatccattcatccactcatacatatataccatgagatatccaacactttcttatataataggatttatgttagatgattttgcccaactgtaggctaatgcaagtgttctgagcatgtgtaacatcggctaagctaagctatggattttggtagattaggtgaattaaattcattttcgacatgtattttcaacttaggatgggtttcctgggacacaactccatcttaagtcaaggaacagctatatactggaaaccattgatttgtatactttttaaatgagtgagctatctcgtataggaattttctctcaataaagcttttttaaaaatctattccaagcttttaatctaaagaaatagttttatcaagtaaaaatttgattttttttttagtttctttgttgaaatttcaatggaaaatggagcaaattaagtatgttctgacagcttatgaatataaactttgtagagactcagaattctttcagaatgaagggcagaattaaggatggagtttttggcctttggtttggttgtttttcttctttagttgactaaagtttatagtttctggcattcctgctttatccctttgatgaagacatactcaaatcactttgactaaaataaacagcaattttctggttgtagatagccacaaataactcctctatcctattacagacattcatcagcaagactgagtaacaaaccaatacctgtataaaaatgaaaggatacaatatcacaagtactaattcaggtaatatcacatttcttagagttatgacacttcaaagaaattttatacttcaaatctaaacagcaggccaaggaattcatattttttccctgagacaggaaagataattcaataatttccccactgaagtttcagttcccatgccagaatgtgagaagtgagagagttcttcaccttgaaaatcaaatcaccacagggactaaaaataaaggttatattcttctaagcaaagcgattataagactgacaaattaaggtgcccatcgaaggagcaatggatacaggaaaaaaaaaaaaaaaactactaacaggcttagttagccacttccaaaatgtaaactgtaaatgtgggaaactcaatgaactgccctacacttgcatctcattttgtgtaacctgagaggctaacatctgttctgcctccttcagaaggcagctgtaaggatggaactagaggccagtaaaggctgttcagtaggtctaaagtcttctgccaagagaagtataatcctcatttcgttctcaaaaagctcagtctctgtagtaacatactgatcatcttctgcaggtataaaatttatgctctgtattagtccgccataacagaataccacagactgggtggcttaaacagcaaaaatttatcgcttgcagtttcggagtctcagaagtccaagatcaaggtgccagcagattcactttctcaatgagggctctcttcctagcttgcaaatggccaccttctggggctgtgtccttacatgtcagagtgagcactggtcatctctggtctctcttcctcttcttataaggacactaatcacatcatgaggagccccaccctcaggatctcatctaaacctaactgccttccaaaggctccacctccaaatactatagcacttggggaacggaaagctaaggcttgaacataggaattttgaggcaatacaattcagtccacggcactcgcctacacaatttctttactgattgtctctaggcagaaattaaatctttgtatcgagagagaaagatagtttgaaaggatggctttaaagggggctgaaggtagcttactgagatttagacaatgtaaaataaaatttaagaacagatgagggtatttggtggagaataatagctaagaagtattaagtatttacctttgtggatagtttccttaggtcacacacctagtttcacgggtcacacaggctacaaagcctttacttttaattatacaatatttgcttctcttttccttggaacaaaggaaaaaatagaagaggaggagaatctaaaagatgaaaccatgaatgagctgctacataaaagtatgtattcatgttcattttgtaccttttgttagatgtggccaaaattttagtttattttttatttttatttatttatttatttatttttgagacggtgtctcgctctgtcaccaggctggaatgcagtggtgcaatctcggcttattgcaacctctgcctcccaggttcaagcagttctcctgcctcagcctcctgagtagctgggactataggcgcgcaccaccacgcccagctaatctttgtatttttagtacagacggggttttaccatgttggccaggatggtctcgatctcttgaccttgtgatctgcccgcctccacctcccaaagtgctgggattacaggcatgagccaccgtgcccggccggccaaaattttacaagcaaatggctcaaaggaaacttgatgagttacaggattctaaatctgtaagttagaaaacaaaccacatgctcagaaggtctggttttttttggtactaagagctaagaaaagtttatctctatgtcctcataaagaaagcagtttaatacggtcaacagcagccttgggaacccctttataaaccattcagtacacacaaacactgttccacaagtgttcgcacaagtcaatggcctcaaatcaatataagtaaagcaaacctgccaaaaataagaaatgcaaagccttcctagtcattcaaacatagatctagggctcaccagaataggagttcttaatgagagggttcatggataggcttcaaaggctacataaaccatctgcaatttatgtactcaaacagtcacaaattatgttctgggagaaagatcatatattacaccaatactcaaagaagtccctgataaaaataaagttaaggacctgtaacaagaattaatgaactacataaccatcaggagagcctatccaaatcatcttaacaaccaaggcactgggtacttatatgccacaattaggctgatgttaaattccaacaagtagctagtactggataaatgcagagtcaaacgctctaacttagcttaccctggaagtagttctaacctcctctaagaagtgcacagtacctgttgcatagtaagcccctgaatatgcactgctgcaattattactggatatattacaagctccaaggacaggaccaaatcttctgcatttctgagttccttgatcattaaaataaatggtcctcaataaagaaagaaaataatacaaacatttaactctacatagatctagcaaataaggaccttagcagaatgggtttatttctaaaaactgaaaagcatccctttgttttataaaatgaaatgttttggaaaacgaagaacacagggaaactgaggggaaataacacttacatggaaccactaacaaattcatactacggtcatccctcggtatccaaggggaactggttccagaacctccacagataccaatatccagacactcgtatataaaacggtatagtatctgcatataacctactcacattctcccatatactttttttttttctttttttttgagatggagtctcactgtgtcacccaggctggagtgcagtggtgtgatctcagctcactgcaacttctgcctcccatttcaagcgattcttccgccccagactcccgagtagctgcgactagaggcgcctaccaccacatctggctaatatttttgtatttttagtagagacagggtttcactataatggccaggctggtctctaactcctgatctcaagtgatctgcccgtctaggcctcccaaagtgctgggattacaggcatgagccaccgtattcggcccggtatactttaaaaagaatctctagattacgtataatacctaatataatataaacgctatattttttaatttgtgcttttttctaaacatttttgccccacagttgattaaatccgtggacacagaagccaagaatacaaagggcttagtgtagcatattttacatgaaccctaacctatcactctaccagaattatgcccatttaaaaatctaattagattgtattattcctttttacatctaaagtttatgctttccgcttacaagacagagtatgaggcacatgtaatgcataagatttatggtcctcgtttctcctgctccatgacaaatagtagagaaaaataaaaactgtaacagagctggcatcggaaatgagcagttatatgaaaaaaaaaatttaataactaagaagggctaaaatccactacactgacaacaccaaatggtagcaagtatgtggagcaacagaaactctcattcattgcttgtgggaatgcaaaatgctagagacacctcgcaagacagcatggccgtttcttacaaaactaaacatactcttaccatgggacacagaaatcacacaccttcatatttactcaaaggagctgaaaacttatctcaccacaaaaaactgcacacagatgcttaaagcagctttattcatcattgccaaaacctggaagcaatccagatgtccttcggtaggtaagcagataaataaacttcagcacagctacatgatggaatattatcagtgataaaaagtagtgagctatcatgctcacagagacatggagaaaccttaagtacattttgctaagagaaataaaccaatctgaaaagactacatactgtatgagtccagttatatgacatctggaaagcaaacctatggagatattaaaaaagatcagtggtggccaggggcttgggggcagagagggagggatgaatagggagaacatagggcatgtttagagcagtaaagactcttctatatgatattgtaatggtagatgcatgttatgaaacatttcaaaacccatggaatgtataacaccaagagtgaaccttaacatacactatagactttagttataaataatgtatcaatattggctcatcaacaataacaatgtaccaaactaattcaagatgttaataggggaaactgggagttaggggggatgcgggaactctgtactttctactcaatttatctgcaaacccaaaaccattctaaaaactagtctactgatttaatgttttaaaattttttaatgttttaatctaccatataaaataaaatgctacttatctaaatgcttaaatgttaggcctgttagcaaaactgaacaacaccaattttctttcccaaaaaaaaaaaaaaaaaaggccagattgctttaatccttacattttccgcacttttagttctccttttccattcaaagagccaggaagtgctagccagagcaatcaggcaacagaaagaaataaaaggcatccaaacaggaaaagaagaagtcaagctactgctctttgctggcaatatgattctatacctagaaaaccctgaagacgccatcaaaagactcctggtacaataaacaacttcagtaaaagtttcaggatacaaagtcaatgtacaaaactcagcagtatgtctatacaccaataatgttgaagctgagagccaatccagaatgcaatcctatttataatagccataaagaaagaaaataactaggaatacacctaaccaaggagggggaaaatctctgcaaagagaactaaaacacactgctagaagaaatgacaggtgggctgggcggggtggctcacgcttgtaatccaagcactttgggaggttgaggcgggcagatcacaaggtcaggaattcaagaccagcctgatcaatatggtgaaaccccatctctactaaaaatacaaaaattagccgggcgtggtggcacatgcctgtagttccagctactcgggagactgaggcaggagaatcatttaaacccgggaggcagaggttgaaatgagccaagatcatacctctgcattcacggctgggtgacaaagcgagactctatctcaaaaaaaaaagaaatgacagatgacacaaatggaaaaacatttgatgctcatagattggaagaatcattaaaatgaccacactttcctaagcaatctacagatttaatgctattcctatcaaactactaatgtcatttttcacagaattaaacaaagtaattctaaaattcatatgaaaccaaaaaaagtacccaaagagccaaagaaatcctaaggggggggggggaatgctggcagcatcacattatccaacttcaagctatactataaggctacggtaatcaaaacaggagggtacaggtacaaaaacagacacatagaccaatgaaacagaatagagaacctacaaataaagtcataaacctacagccatctgatctttgacaatgctgacaaaaacaagcaatgggtaaaggactgcctattcaaaaaatggtgctgggatagctagctagccatatgcagaactggaccgctaccttttcccatatataaacatcaactcaaggtggattaaatatttaaatgcaagaccacaaactgtaaaaatcccagaagaaaacctaaaaaacaccattccgacccttggctttaggaaataatttatgactaagtcctcaaaagcaactgcaacaaaaacaaaaattgacaactgggacctaattaaactaaagagcttctgcacagcaaaagaaactatcaacaaagggccaggcatggtagctcatgcctataatcccagcattttgggaggcccaggggggcggatcacctgaggtcagcagtttgagatctgcctgaacaacatggtgaagctccatttctactaaaaaaaaaaaaaaaaaaaaaaaaaaagccaggcatggtagtgagcgcctgtaatcccagctacttgggaggctgaggcagagaatcacttgaacctgggaggtggaggttgcagcgagctgagatcacgccactgcactccagtctgggtaacagggtgagactccaactcaaaaaaacaaaactgtcaacaaagtaaacagacaacctacaaaatagcagaaaatatttaaatatcatgcatctgacaaaggtctaatacccagaatctataaggaactttaacaatacaacaagcagaaaacaaataaccccattacaaactaagcaaaaggcattaacagacattcctcaaaagaagacatacaagtggccaacaaatatgataaaatgtttaacatcattcatcatcagagagatgcaaatcaaaaccacaatgaaatatcgtctcacgccagtcagaatggctattattaaaaagccaaaaaacaacagacactggtgaggctgtggataaaagggaacagttatacactgttggtgggaacataaattggttcagccactgtggaaagcagtttggagatttcccattaccaggtatacatgcaaaagaaattaaatcgttctaccaaaaatacacatgcactcgtatgttcatcacagcgctatacacaataccaaagacatggaatcaacctaggaacccaccaatgatggactgataaagaaaatgtggtacaggctgggtacggtagctcgcgtctgtaatcccagcactatgggaggcagaggtgagcagatcacccgagctcaagagttgggagactagccagggcaacatggtaaaaccccatctctactaaaaagataaaaattagccaggtgtggtggcacacatctgtagtcccagctactcaggaggctgaggcaaaagaatcgcttgcacccgcaaggtggaggttgcaatgagctgagattgtgccactgaactcctgcctaggcaacagagtgagacactctcacaaataaacgaacaaggctgggcgcggtggttcacgcctgtaatcccagcactttgggaggctgaggcgagtggattacctgaggtcaggagttcgagaccagcctggccaacacggtgaaaccccatctctactaaaaatacaaaaattagcagggcatggtggcaggcgcctgtagtcccagctactcaggaggctgaggcaggagtatagcttgaacccaggaggcagagattatagagagctgagattgcgccactgcactccagcctcggcaacagagcaagactccatctcaaaaataaaaaataaaataaaaacagttgaaattatcaaaaaaaaaaagtaaataaaatgtaatggaggtactagtgaaaaaaataataagatccaaactcaaattgctcctgcacccaacacacttaagagtaaatactgttaagagtcctttccatgaacatctaacatattgagaaaggtgaatatttcattactgaacatttactctaacctatgttaagaattatgatctgtggaaagagcacaggctaaggaagctgcctaggtaaatagccaaaaaacatacacataagatgaaaacttgtctgcgtcattttcctaccactcaaaaaagaaggtaacagtaagaaataaacagcaaaaacaaaaagaaaaaattgttcaaatgttcaatctagatataggtttttctgtataatttaatcaattaataaataaatacacatgtatctttcttcccccaaccacaccccccccacacaacttttttttttttttgagacggagtctcactctgtcccccaggctggagtgcagtggcgtgatctcagctcactgcaagctccgcctcccaggttcacgtcattctcctgcctccgcctaccgagtagctgggactacaggcacccgccaacacacccggctaattttttgtatttttacaaaatgtttttcaccatgttagccaggacggtctcgatctcctgacctcgtgatccgccgcctcggcctcccaaagtgctgggattacaggcgcgagccaccacacccaacctaccacacacaactttctaaagttcctggataatgttctaaactctttttctatgttttacatgtaacttatgcaagccattcactttactaagcaaatgaacagtagtgtctgtggccaaaaataataagacttaaaattttgagtccttccaaaagaacttgtattaaatctttggaatagaaaaaaaaagttcatattagggagtagatctgggtattgaaaggcctgtctttttttgttggtaatgccaaagaatgtcatcacacaagactcaccttataatattatttatgtataagttatcaattacatatatttaacattttaagtgaaagcaagtttattaagaaagcaaaggaataaagaacggctattccttaggcagagtagcctatatttaacattttttaaatgtttaaaattataaagctggtgagtaaaacaaaaacatctttgagtgatacagatcggcagaatttccccagcctcattcctgagagaccaccacataaaaataacttggttatctgcttctgtatgtaaactcaggttgtttgtgcaaaacataaactgccccaactaagaaatcctgaagaacatgcaaaaggaggtactttcactgtcattttattaaaaggcacacaagtcactactgctgaatataccactgtttctacccagctattttaaaattattggtagataatgtggtgagctactggtaaatacagctgtgaacacagcagcacacaccatctggaggcttttgacttaagcgatttttcaaatgcacagtatatttacactcttttgttcctttgaagcccaccagtcacatataaatggaccctttcttaaaactacaactacaaaagctcattcatcttgtggaaaacaagatatgagaaacaaatctaattgttcagctttagaacaagtgattatttcaaatcattaacagcataaatactttactttttctatttttattttttttaatagatagagacagggtctcgctatgttgccaaggctagtcttgaacttctggactccagagatcgagatcttcccaatagggcctctcaaaatgctaggattacagacgtgagccactgcacctggccccaacactttacttttataatgatctcccatacttacccattatattcttattatcttaacaagaagcttctgattaatactctaaaattaaatgttttcttcttttttgtttttcaatgagacagggtcttgccctgtcactctggctggagtgcagtggtgcaatcatggctcactaacctgctcagaaattatgtttgtaagtttcacgaatcatcatgctcatttttatttgttttgtcctcctccactggaaaataaatgctatgagaacagagacttcatcttttttgtatcttcagcaactaaaacagtacctagtacataattagtgctcactatgttaactattcactgttttcccatgctaagcatggtcctaaagcatttcgtaaaccctctaggtagactcattattttctggtatgagaaaacagtcacagaggttaaataacttaccccaggtatcacagtgagtaagtggtaaactaagaatagaactcaaactcagacagcctaactatttaccactacgctgtactgaataaattaatgaattacaccagagttcaatgataacattaaaaattgagtaaaattatgctaattttcctattgactaagcatcaacattattctgttttattacaaatatttaagtatgtcaactatttcatggattaattagattttagagggaaagtctaagaccccaatcatcattaatatgtggaattggataacaacctggaaaaagacttacaaatgaacttgtgatataacctgtttgaattggatgtaggatacctacttccctccattattccttggattcagcagtctgttgccaatctgaatgttttaacttcttttaattagagaaaacattttctatataagttacaatgaaattatcacgttttctagaaaatactgcactctactgcttcattccaggttgtctgaagatggaccaatttctccaatgaattaaaaagtatcttagtctaagacaagctctctttctacccagccacccccacgagatcccactccgccccaacaaccctcagcccccatcttctatcagcaaactgggcctctgacacaaaggtaccacatttataatatcagctttagtcataaacagatttcaatcaagtttgtttctacgacttttgctcctttttaaaaatgcaatggatagcccaggcgcagtggctcatgcctgtaataccagcactttgggaggccgaggcgagtggatcacaaggtcaggagttcgagaccaacctcgccaacatagtgaaaccccatctctactaaaaatacaaaaattagccaggcgtggtggcacacgcttgtagtcccagctactcaggaggctgaggctggagaatcacttgaacccgggagacggaggctgcagtgagccgagaccatgccattgcactccagcctgggtgacagagtgagactccaactcaaaaaaaataaaaataaaaataaatgcagtagataataacagctctggacagtagtatctactcaacaggaaagcagacagtaaagagaccagaccactgagaacccatgtcagtcacattacaatctatgttacagcctgaaaagcctgaaaagactcaaatctactcataaatactttctaataacttgaaacaataacactataaaatatcaagttggccacacatgcccctgagcagacacgtctaaaagcttctatgtgccacccagcccatggccaaactgctgttggtcaatgggttgctcaagtccttttgtacaatgtaacgagaggtaagagacaagggggaaacattctagccaccttatctccaatgatgccaacatttatttctgcttgagttttacaaactaatcctagactagttaacaaagaacccatttttcattgttgatttttacacaaaatattggcttcctatgtcattataaaatggatggctccatcggcttctcagcctacacaatagcaagcaaaaccctttggccttggaaaagcatggtaaatataatacctactaataagttacatggtttaccaatttcctcaaaatcaaaaataaatctctcacaagtcaactattaaataagtaaacaaaagcttgtcttgttctatcacttgcttaaaagcaagcacggtggcatgggagagggattaagaaacacaaccagtcaagtccataaaaccttcagtgtaagataaaactaccctgtaggagcagccaatgcattctgacctaacagctgtacacagttgcactagttaaaatgaaaagctagtctgcatcacacacaggcaattcactgagccttactgatacgttgatggggtttaccatcacagtcttccctcccctaacctacaatgtaaaaaatgaattgccatatagctgaaggcaccgggatgggggtgaggggaatacacacacacacacacacacacacacacacacacacgcacacactccctccctccctctctcaggcatttcaaaaataatcacaaccatgtagattgtaacatatcctatacgctataaaaacacacacacaaaggaagtggtacagctacattacgtcagctcttgcctcaattcataaatgcaaaaaccacaaaacaagacaaaaatctaaacggcctttttctggaaatcttagagtgaatgaatgtgggttaagtctttaaatatgttattgaacacttctcgcagatgcattgctttcatcagccacggggagggaaaaagtgtaatcttggtcaattctatcatgcaaccagatcaaataacatttcaagtgcagcctgccaagcgccagcgcctgccggagtacaatgagcgctcaactgctctggactgaaaaaccatctttcactggtcccagggatctttataaaatagtttaaacactactaaattacagagttagaaaaaaaaaatacaagctcaactctgctgcccccacactattgtgaagctgctgttaagcatctaaaaatctgccttgtgtaatttactaggcaatgtaaatattcagaaaggcaactgcctctcagagcccaagtctaacacatgcataaaaatgtagagttggttgtgcttctggaaataattgcccacagatcaacgtgcttacatgggatattgttcccatctgtaaggtttcaaatcatgtctactttaaatttggagtttccagaaagaggaaaaaaaaaaaaaagccagaactcaaaacagtaattttggcacagaattgtgaggactttgttaaatctgttctcaacttttactcagtgtctcaatcttaaaacacagaggcacaaagggaaaatggaatttctctgtagacacccgtgttcattcacagaccattttttagattttccgtgtggctgagaggcctccagccaaacaatgcccacagagcgcggggcacatgtgcgccagggacgcttaagggctgcaagtaaaacaaagtaacctattacaggagtttccttctcagcaaacaaaaagtggtcaagcaggtctccctacagtttcagaaaacaagagttgagtaaacaagagaggagaaacaaggaagacagcatcccacactaaaaaattcttttaacaatttaaacgtaaaacaatcgtcaagagtacctccgcattttagctactctggcaaaataacagtagttcggtccaagaagaaaatttcatttgtcacttaagtagcctcaaatcaagtccatcaaattcattttatttttaaacttgtttattccacagtaaagcaatgaagtttctgatcaaagagcgacttctgcattatactcggcttcaaaagcactttcctttcagaagaaaaaaataaaaatatatacatatacatgtatttttaaatagtgttttctctcccccctcaaaaaaatgttttctgttcgatttaattaactgagatttcaagagtttggggctacttaaaaactagtgagcccaacagaaatgcaatgggacacggcaaatactgactccccgttcctggaaagccatcatcattcttaggaacacccgagttccatctttctagggtcggctggaacactccgtgcacccaccccgagccccccgcccgcacttgtccaactttctggcccgagattcgcgtccccctcgacgcacgaggccgccggccacttgcctgcggcccgctggcggcgagagctgagcccgcgggcctggtcctcctcctccggcgcagggccccgccaactccggacccgcggaaaggggcggcgcaggcgggcaggtgggggcccggggagtgaagtgcacttgctaaaacaaaaggaggcctgagcggccgcagggcaccgcggcgcgggcgcaggtcccggcggcttggcggctccgggaggcggtggccgcgcggggccccgcccgcggctagggaggcggccgccctggcccgagcctgctgcccacggccgcggcactcagctcgcactccttcagcccgggaggccgggccagcactgccacatgccggtgacccagacgccgggagagaaagagcagactccccgcgacggcggcggccggcaaaacccgggctggagcccagcccgctccgcgcgcacccctgctggccgccgccgcgggcgcgcgcacacacaatgccagctgcaattttatctccttcgttgcttggccagcctccacccgctccaatcctccctcccctccgacagccggaactgggagcctgcgtgattgatggcagctcttaatagcgtggtcagctagaaaatgcatctgcaagcaagatattaaagaggcagcgcatccctgtgagtgatcagcatttcacacatcctagagctgcctctgcttctgccaggaatattaatgccaaccacctctgacgtctaataaatgcagatgaaacaaccaacaatcacagacaagctaaacatttatttcaaagatgcaccgggagaaagcagcattgtttcgtgtcaaagaacacttctgaccccagttttccttacacattaagaattctctgcaagccatttgtttaaaaatctcaccaatcccttttccacaagtaaataaagatccatctgttagacaagacatagcttaaattgtgcatgattgaaattcatctaataaggaagcaaaataagtgcacattccttaccatgtggctttaaataaacatataacctaccagctaccagattccaaactccctcattaattcaatttttatgtgaatcttaacagattaccaactgttaatttcaaactaatttcttacccacccacaattaattctggtaaaaaatatatatatcaacttgctaaattttattaaaattaaagtacatttaaagcatgtattctctagtggtgatagccaagatcattttgtcctcccaaagacattgtataggaattttttaaatgtattcctataaaatacaaattctaactattaagttcactcagtgtcaacccaaattagaaaggtacaagctgaaaatttaaatgattacttctggtatcttcactattacacctttccccttccaggcaagtttcatggaactctcaaatagcttcataaatgttaattagactttccaaggccctataaagtggctgcattatcaggtactctctttccaataaacagagaaatttagacagattaaagtgatttgcctatagtctctcaacaagatgggggtggggccaggctgaatagaacccaggggtcctgctttgttgccacagacagccaaacagacatgcacatgcatgtttgctatttaaagataactctgctggtctctctttaaagacaaatcaagttattctacaggacatagaaatatctgtctcaaactcctaacacagcacatgtactgagagcaagagctgatgaggcataatgtctttgcccccctgaaaggtggctgtgatcaatacaaatcagagatggtctgtagtgcaaatctagctctgctataagctccactaaacaccattcctcagtgaaaccatcctgagggggacctgtgacttgaaaatctgcttcatatccaagtggctatgagattactccatatatgtcagagatgaaattgatcctaaagccttgctacaaagctactcctgtacttggacacacttccaattttctaaccagctatatccagacacatggcacaggctgaaaagaatttcttttttcttttctacagaccattttaaaagtgccagtttatagtgagttggaaaaggctggtgagaagaagcaaaccgctctattctgaattcatactgtacctagtctctcagggattctaaatgctttgacagcattttatgccactcaaattcttttgtgctcatcttgcacctgctgctaatccaacctgcacccagccccccactttgcagttacaccagtttttccacttcccccaggtatagggatttctaccacaggccagcaggcttcttcccaccagagcaggaataatctccttgcagccccaaacagccactcacagaccgtttaaagcctccttcagatctcaggtcaaacatcactttttcagagaagcttcccctgagatcccattctaggtcaagttcctttgttataagttctcatagaactgtgttcctccttcacagcattgatctccgtttgtaagtcatgggtgtgattttttttaacactcatagccccttctaaacagttccatagagttctatagagaaggttctatatgtttgctcatcatgtagatttatgtcaggtacacaaatctgttgaatgaataaatgaactgaggtcaacaacactgctttactcactccatatattctctgcacatttcttggcacaaagaagcctatctcaaataagtaacatctatgcaaataagaatatcttctattggccggatgcggtggctcacgcctataatcccagcactttgggaggccgaggtgggcagatcatgaggtcaggagatcgagaccatcctggctaacatggtgaaaccctgtctttactaaaaatacaaaaaattagccgggcgtggtggcggccacctgtagtcccagctactagggaggctaaggcaggagaatggtgtgaacccaggaggtggagcttgccgtgagctgatattgccatgcactccaggctgggtgacagagcaagactccgtctccaaaaaaaaaaaaaaaaaaaaaaaaagaatgtcttctattaacctttaaaagcctagtaagccaagagtggtggttcacgcctgtagtcccagccgctcaggaggctgagacaggaggatcctttgagcctaggagtttgagtccagcaacataacaagactcagtctctaaaaaaaaatttagaaaaataaaaagtctagtaaaaaggaggatttttatccccattttatgaagatataaaataattgtgcctggggttactcaaaaacacagagatcctaactagtgtcctatttccaagctacactttttaagagttaatgaagtatagaagccatcgctagtttattcaagccaagttcttcctattacccagcccttaagggatatgcaaacagccacaggtaaactggacagaggactaaatcttgtatacacacagagcaatataaacagaatataaaacttagaaagtactttgtacactagtttgtcttcaaagcttctcagaatgcaaaagcactaccaaattctgctgtgaatgaggggagttcattcttacctcccttttacactgaacttactttattttcaggtttttttctctaagtaacagacctgacatggaagccttcgaaagagctctttccacctaggaactcaatggtgggtgtactcctcaaagtgaaacatttgttttaaccctcattagtatgagtttgtaaattactttgtgaagaggaaaaatcaaagttattacaacaaaaactataatttttcaggtgttttgcacatgaccacatgaaaaagtaataggaagaataattatgtaagataaatgaaaaatattagatataccacatccctcccaaattaatactcattatgactgtcagcattccacaagggattccttggttcccatgttatctccctggcctggtctgcaccattgcttctttttgtcctaagctccattccacacaaattccagctctccgtttccataacacccgtcatttatcaaaacaaccctgtcaagttgagtaccattaacagataatgagaggagacaacagatgtggctggaagcaaagcactctatattctacaggcctcagcatgcagccaagtgagctgacatctgactttatcctaacagttataattaaatcgaaagtctagttaaactaacattaaagctatgaccagaaacatcacacaggggaaatgtgaaggggaaccttagcaatagctgaacaggacccacattattccagacccttaacctggagcaaccaccctgcatggactctctccaccactccgctctgtcacagcaaaggaagaatcataaccatatcttctgaagatggcaactttgggccactttccaagaccaccgaggcagcaaggaaactgcatttttacatgaaagtttaaacagtagcactcatttaataacactaataagtgtcaaaattctaactatcaagttacctgagacaatcaacattctttcctatagcattatccagtacaaccattcagaccaagtaatttagctcacccatgtcaaaatgtcaaaagtacaccccaacgtcatccagcaaacagtgactgaatccaggattgtattagtaccagttagctatgtccgcataggatgctagggtggagaggatttgatttgtaacacagtactccacttttatccacagtttcgctttccaaggcttcagttaccctgagtcaactacagttcaaaaataggtgactaaggtacagtaagatactttgagaggccacattcatataattttcattacaatgtattgttataattgttcttattattgataatttaatttcccttataaatcaaattttatcataggtaggtatgtgtaggaaaatagtaaaaacagggttcagtattatccagtttcaggaacccacgggggccttggaacacattcccaagggtaagaggaaactactgtcctatacagaatacggagggatatggtttggctctttgtccgcatccaaatctcatcttgtagctcccataattcccacatgttgtgggaaggacccggttggagataactgaatcatgggggcaggtctttcccatgctgttttcgtcatagtggataagtctcacaacatctgatggttgcttttttgtttttgtttttgtttttgttttgaggcggagtctcactctgacccccaggctggagtgcagtggcatgatctcagctcaccgcaacctctgctcaccacaacctccacctcccaggttcaagcaatgctcctgtctcagcctcccaagtagctggggactacaggtgtgtgccaccacacccagttaattttctatttttagtagagatagggtttcaccatgttggccagctggtctggaactcctgacctcactgaatccacccacctcagtctccgaaagtgctggaattacaggcatgaaccactgaacccggccaatctgacggttttaaaaatgggagtctccctgcacaacctctccatctctttgcctgctgtcatccatagaagatgtgacttgctcttctttgccttccgcctccccagccacgtggaactgtgagtccactaaacctcttttcttcccagtctctggtatgtctttatcagcagcatgaaaatatactaatacatggagttacaattttaagcaaactatctacttcttttgcttttccaactcaccaaaatgtcactagacaacaaaaactctggagtttttttttttttttttttttttttgagacagagtctcactctgtcgcccaggttggagtgcagtggtgcaatctcggctcactgcaagctccatctcctgggttcacgccattcttctgcctcagcctcccgagtagctggaactacaggtgcccgccaccacacccagctaatttattttttttgtatttttttagtagagacggcgtttcaccgtgttagccaggatggtctcgatctcctgacctcatgatctgcccgccttggcttcccaaagtgctgggattacaggcgtgagccaccgtgcccggcaactctagagtttttaaaagaaaaaagaaaaatataaaattcttgaagctcttttagattttttaatttttttttttcttatattgagacagggtctcagtatgttgcccacgttggtcatgaactcctgagctcaagcaatccacccacctcggcctcccaaagtgctaagattacgggtgagccacggcacccagctcccttgtagattttttttagagtatatggtcctacggaaaatccaagcaattccacttaacaggctgaaggtttaccaggctcttctctagaacataggtacaaaagcatgcacatatacataaaaacatatgtattcatttgtctgagggttcacttgttgattttttgtcacaaagatgaaatcccactatttatgttatacagcaagtcacttctctcactttacagaagaccattaacatcccattcttgtttattactgcaaagaactgaacagtgtgggagtcccataattattatataacaagccccttattgagtctttttcacattttttactcttataaacagtgctacaacaaacttctttgtgcatacatgtatttctacactgaaggaatccctagttcaatgaatatacactctttcagagagagtcaaacagccatccaaaagctgtacaacttatactcttaccagcagtgggtcctggtcctgttcccatactcttattctggtttttgttggtttggttttggattaggcactctcttggatctcctacctttctggcgattctctctttctttccatgactcctcctaaatacaagtagtccctgtcaagcctccttttatcacattcggccatctcacatcagtgaaaagatccactctcaagctgtttctgtgtttgtgattccaaaatttgatttttccagctgagcttgcttcttagcaagaggcccacatatgcaaatgccctatgggttccaccataatggcattccacagacactctcaatcccaaaccaaatcaaaatgttcttccccctaagtcctggggggactgttgcaatctacgtaatatactcttgaatatactgttgcagtctacgtaatatactcttgaaaaataactagaaataacatcagattataaaaagaaaacaaaaagcccaagacagactggcctttagtaaaactctgaatagcacactttaaagtgaaataacataggtacaacattaaggttgggcattagttacaaccttccttcatgttttactttccaacatagtcccaaacatagatatttgtttgtttgtttgttttttgagacggagtctcgctgtgtcacccaggctgatgtgcagtagcatgatctcggctcattgcaagctccgcctcccaggttgatgccattctcctgcctcagcctccctagtagctgggactacaggtgcccaccacgcccggctaattttttgtatttttagtagagacggggtttcaccgtgttagccaggacggtctcaatctcctgacctcttgatccgcctgcctcagcctcccaaagtgctgggattacaggcgtgagccaccgtgcctggccatagtcccaaacatatttaagagtgataggccaggcggagtagcttacacctgtaaactactgggattacagtagcaaagtgctgtaatcccagcactttgggaggccaaggcgggtggatcacttaaggccaggagttcaaaaccagcctgaccaacatggcaacaccccatctccattaaaattacaaaaattagctgggcatggtggcgcatgcctataatcccagctactcgggaggctgaggcaggagaatcacttgaacctgggaggcggaggctgctgtgagcccagatcgagccactgcactccagcctgggtgacagagtgtgactctgtctccaaaaaaaaaaaaaaaaaaaaaaaaaaaaaagggagtgataaactgctaataagtatttaaagtattatatcatgaaatacattatcagcattataaaaatatactccagaaaacaaaaaatacaactttccactaggctcccgggggcatcacagcaaactgttatgacattagtcatcaatcgaaggtcaggcctggaggttttagtttttggaagtgtgcagccgtctcatggatgtagccctaaaccaacttcagacagagagcaagacctcttagatagcacatgctttaaatatgtttaaggacattttcatttttatttcaaaactcactagagatctcagactgtgcagatcaaattattaaattccaatagagcgatacgttgaaaagccaaagcagggttaagaagagaaatttctcgtttggaaaagggttttacagatttaaaaacaaacagttttgtggaagaaagagctcagggatgcagggcctcaatgggatgtttaaaatgaggcccctcgtgtattttgaactgatgatatatgataaaatcagtgtggagatccagccaaatgtactggaagtaatcttaaggataactcaaaaccacaactgaaatcaatatcctaagaattcaaaatattaaccagacagataattgtatgacttattaaaataatgtacacaaattcaaaatataattttgccctttattattattaggacatgttttctctagtattatgccgccaataaatgaaaatactttaaaataaaattacacacgtgtatttcagaaaaaaatacatacatttaaatgtttcaaaaaattaaatgagtaccatttgccagtctcagcatcagaggtagcattacagatccaggaactgcctgcctaaaagccaataactgctctctagaaaatgccagaagactccagttaaaaatatacactcaaacattatataatacattggctaaaacaaaaatcaaaagccacagattcgagaatgtttgatctgcacaacacagggtggtttcttgtgttttcttctgaagggattagaagtgagtgagactgtcataaagacaaatgctgaacatacattctggagtttaattttaactaaaagagcaaatacttgggctgcaggaaacaacaactgagtgagtacaaaggaaggcatgggctaacttctaacgtttacatcatctgattaattccaacaataaaatctaaacactgatcatcccctccaatcttcagagcaagctgactctacagtgaagaatacgagagccctatcagctgactctggtatgtttaaacgattataatgtaaagcatgttcattctcttaagtgaaaggaaatgactgccaaatgcttccttcacaatctctccagaatagggcaggtcctttaatgtgagattttcctgacattccaattgtagcagacattgaacaaacagagacgcattaaaagccgacctggttctattatcttttattgaaggcctagcaaagatcagacatgagccctgtgctatttacattttttggtgcattaatcacttttatactcaagggctttagaaaaattcaatggatttttttttttaatgaaaaacaaaataaaaaaaaaacacaggatgtaaccacagctatattggtctttttctcaggaaggtcagaaaagctttaaaaacaggaagtctgtgctataaggttgagaaatgtttgttttaacagcctaaggcgtcatggttgcagtttgcagtcagctgctatggaggactatagtttattcttcccagccaaggattaatgtccctagggaaaaggccaaaaaggtactcatataactagaaaagcacattatcctaaaataagacttgttataaaatctgaatcataaatcttacaagatacctttcaacattaaataggaactaatttagtaactggaggaggaacagtttgtcttttgtggtaatttataaaggctaaggaaaaaccatagtaaccaatgctaagacaacctcctagaaacaattagcagtgggttaagaattggtgcttgccatttgatacaagttttctattgattacctctattttaatcattatactaatattaattattaaaatcaaatgtaaaaatgacactcttgcttgaatgcaaattcttgcaaaaaaggcagattaactttaaaaatgttttatccctaacaaaatggttggtctctgcttttaagaaaaaaattttttttaattaaaaactttggccaggcacagtggctcacatctataatcctagcactttgggaggctgaggtgggcggatcacctgaggtcaggagttcaagaccagcctcgccaacacggtgaaaccccatctctactaaaaatacaaaaattagctgggcgtgatggcaggcacctgtagtcccagctacttgggaggctgaggcagaagaaccacttgaacccgggaggcagagcctgtagggagccgagattgtaccactgcactccagcctgggcaacaagagcaaaactccatctcaaaaataatgatgatgataataataataatagtaattgcaaacttcaactacagtgctaaacagtcttaacatacctaacattaaaggtattttatttcaaaaattacaattttctgattccattctttatacttagcttacacaggcaatcaaaatgaggctttttcatggtggactccattttaaatggaattaaacgttatattatgaaaactttaagccaaaaatatccaaatattaatattaaaatacacatagcacatgaatttaaaattcatttggcttttaaagggtagtgattggaaaaatcctatcatgataaagtgctttaaaatacaaacataaatggctaataccacaaagtttgccattcaccccaagaagtaattttctatttgatagttatagctatctttaaatttttaaatatttatttctacaatatctctagagaggattgaactactgccatttaacagatgggagtaaaatgaaattctctcaactttatcttttcccttatggttcagaagacatcactctaataactttatctttccaaggggcatcattcaagtaacaactcatcctaaaaggcccatactggctttcagttgagtgtattctgtattatgctctggcgtctttcctgaaaattggaagacaatagagtaacgccttcaaatttttgaggaaaatagtctccaacctacagttctatacccggccaaactgtgagataatcaaggatgagcataaaataaagacattttcagacacacacagcctcaaaacatttacttcccatgtacccttctcaggaaaatacttcacaaacaacagagggaaccccaaccaagaagccatgaaaaatgatctgagagtcatatgaaagggaagtcttcttccaacaactcagtggcagatctagacaccaaaatgaggcaatgggttccaggaggatagcaccaaggctgatctatagattaatattttccattacactgattttccaatagttctgttggaaaatttaagggtgatttagagacggggcatacaaaacaaaacaaagaatcaaaagagagacaattattaattccaggaaagaagttgtacaagaaatgtaattcaatcataccacaatttttttttttaagacggagtctcactctgtcgccaagccggaatgcagtggagcgatcctggctcactgcaacctccgcctcctgggttcaagtgattctcctgcctcagcctcccgaatagctgggactacaggcgtgcgctaccacgcctggctaatttttgtatttttagtagggatggggtttcaccatgttcgccaggatgctctcaatctcttgaccttatgatctgcccgtcctggcctcccaaagtgccgggattacagtcgtgagccaccacgcccagcccacaatatttgttttaagctataacaatatatacatgcctataataatataaacattcggctgggtgcggtggctcacacctgtaatcccagcactttgggaggccgaggcgggcagatcacctgaggtcaggagttcgagaccagcctgaccaacatggtgaaaccccgtctctactaaaaacacaaaattagccaggcgtggtggcaggcgcctgtaatccgtgctactggggaggctgaggcaggagaatcgcttgaacccaggaggcggaggttttggtaagccgagattgcaccattgcattccagcctgggcaacaagagcgaaactccgtcttaataataataataatataaacattcaatactgatttaaccacaaatggtgatattaccacaatgagaaggaagaggaagaggagaaagtagaagatatataaaaggtgacgggctggcaaggaggctcacatctgtaatcctagcactttgggaggccacagcaggcagattgcttgagctcaagagttcaggaccagtctggaaaacatgacaaaaccttgtctctacaaaaaatacaaaaattagccaggtgtagtggtgcgtgcctataatcccagctactcaggagactaaggcaggaggattgttgagcccagaaagtagaagttgcagtgagccatgatcatgccactggattccagcctggatgacagagcaagaccctgtctggggcgggacgggcggggaagagatttaaatggctaaatttaaattactcattgggtaaactcagcaagtgatgtctaaaatagaaaataaaaacaggtcaggcacagtggctcacacctgtggtctcagctacttgggagactgaggcgggaggatcccttcagccatggagggcgaagctgcagtgaacagtgatcaagccactgcactccttcctgggcaacaaagtaaggccccatctcgagggaaaaaaaaaagacaaaaagaaaagataaagaagccaggcatggtggctcatgcctataattctaacactttgagaggccaaggtggcaggatcacttgagctcaggagttcaagtccggcctaggcaacactgcaagatctcatctctacaaaaaaaaaaaaaaaaaaattaaaaaattagccaagtgttagggcacacacctgtggtcccagctatttgagagcctgaaggatcacttgagcctgggaggtcaaggctgcagtgacccaagactgcaccactgcactccagcctgggcaacagagcaagactctgtctcaaaaaataaaaataaaacataaaacataagcatgtcctttagcaatattgagataagtgacaaaataaatggttttaaaagttcaaacagtttgcctctgagaagtgaaactcaaggatgggaggaactactaaaataaacaaacaaaaaaaaataaacagtacaccaccacttgattaagtacgtgcacatatattacctagaaaaaaaaatcatatgaaattaaaaattaacacaaatgttcccagaagatctttgctacctttttttaaaaaaaattcactaacccatgtgctttgatcacctggtgaagaaagtaataaaatttcagaatggaaaaaaagaaaaggaataaaaaaaaacctagccaaagaagcaatcaatctttttaagacgtaggcatcggactgaaatttatttttcttcagagggcaggctgtactacattttgcaacctgctagtaagactcctgaaatttggcccctcgataataataatcttataccaaaaagaaaggaaaaagacacaatcacaattttaaaaaataaatgatataacaactcaatcactataattttagtatgtataaatgagaaatacatcactaactaaagtaacagcttttaaaagaagcagtaggtgaaagtacaaatagatcatccagcttcaaaaaacttaatgaatttttaaaatcatttttagcattttacccatttgtttattcacaattatgttccatagtcagctaatggtttttgaaaaagagagtaagaataagatggataagggaaaggaaaatcaagcatgttctaaattgcaagttaatcattaggtcaacagtggtagttttcagtatttctcaaacacaataacgccttgtcatcgattgagaatactgaattttaatgccattgttttgtcaataaaaagtgcttatgtacacttcacgagttcattaataatcctctaagaagacctaaattaaagcttggcaagcagtttctcatgaaacaaaatttgctttagttctggtttgttagaactaaatgcaccaagtggcaaattaagatgtagaaacataccttaaaggttatgctttgaaagtattcaatgactcaaacagaggcatcattaggcagtagcaaaataaatactaagattcctatttcatttgcaatctgttaagtttcagacagataattttacaatgaccaccaatagctatcaggataaacttcgaaaggagatagacatacattccctaaatttcatcagaggactggaaggtaaccaggatagatcccattttcagcattaaaagtgatcaaaagagtccaataattcacatagaagatgccattgtgctgtctatactgtgtgtatttaatgtccatgggaatgctgacatgtgcactccaagtggtgattgaagagtcaactaagtagggggaaagggcttggagcaaaaatttcaactaaaaataatccagttacaggagaatagtaccaggcaagctggaaaaactataatcaaagtctgtatttccagtttcaatagtaaacacagttgttaagagtggttaacacacaagaccataagtgcatgcaatttcaagtcagaaacatctgttttaccaatagtatccctgttatgtcctccatttctttactaaagcagaatgtgagagtaagaacaagagcaagcacaatgtatgaaagaaagtaagcagtcaatttaccttagaaaacattaggactttcatataagttcctaaaatcataaattctaaagccgttagatttctagaacttgacaagatttctttaaaaaacagggtcagataagaattttgcctttcctcctattagtttttagtccccaccagctgaagcagggtgcccgtttctacaccaaagagcggcaaaatgaagaaaatcaagcaaattacacagcaaaggcagaaatgccttctatttcatgagaaaagagaaatggtgcaagccaatggatcaccaacctcaatgcactgaacagctgaatttttttgtttagttctgagaataaagctgtggtttaatttcatcaatagtgaagtttagtcctacctattttgctgggtgattttaaatggtaggtgactctcttcatctggtactctaagagcaggcagcaacatttcatccttagttctgactgagcttcccagtcttcagcaaatttagcctagtggtaaaggtctctagctctggagtcagatggccagggttctcctaatctaagattttctaactgcataaccttgggaaagtctccatatgcccatctatacaatgtggttaataacagtacccactgcacaaggttatcatggagatgaaatgaaataattcaagcaaggccttggatggagtgcacagcacacaggaaatgctcagtgaatgccagacaccattaaccgtgtcatcttggactctgtcatcgacttattgtaaaaacctgattaaaacaattaaaggagggcctaaatcaccccaacagtgagggtggtaattcattatttgtctgtgaagtacatcaccccactaaaaaaaagaaacaggcagggggcagcaaaatcagcattttgcttttcatccttgttactatcactgctacattatttatgtgaactgggaaggagtgtgtccggacagatgctcagctgggttctgcaagcagagcatccatcacaaaaggtagtgcctgtctcaggagcaagcccctttcctgcctcctctctccccttcatcagtcaccactagggagagcacagtggagccacacagcagctgggcaatgtcaaaacattattgtccaagcactctgttcaatgattttgatgaaataaagtaatccacccctaaatgactcattttgtcccaaattagcatccttaaggtaattattaaatatccaaaaggatccagggtgtattagaaacaaaggagggggtgaggaacattgatatactaccaacaggcaccctactataaatttactaaaacaggaatcatgaaatgattgaaatgacaccaaattatacaacataaacatagaggaacaaatgacagagatttgccctctgcttaattcagcttacatagatgtctatcaaagacaagtttctacagagtcacaagcacactgtattcaaataatcttcatttccattttctctggacaagcgaaagtaagcctaccacaacagttaatgggttaaaaactgtcacattttcaaaacatttacattatttaaatgcttatgtgtctaccaccacccccagagaattaatcacctccttattactgtcacctctctaccctccatataattctactgctgcgtttctcacagacttaaaattattttcatataaattggtctttgctgctatatgaagcaactcagggcatggagcacgtttgattcatttttgtattcccaaatcttcctgaataatttactcactcattaatggaacttacaagccctaatatgtgccagatgctttggggcggctgaggcgggcaaatcatgatttcaagagatcgagaccatcctggccaacatggtgaaaccctgcctctactaaaaatacaaaaaaaaaaaaatttagctgggcatggtggtgcacgcctgtagtgccagctactcaggaggctgaggcaggagaatcgcttgaacccaggaggcagaggttgcaatgagccgagatcgcgccacagcactccagcctggcggcagcaagactccatctcaaaaaaaaaaaaaacagcacaagcacttagaatacatctatgaacaaagtagaaagacactcctgacctcaaggggtttacattctgcagggagaaacaaacaataaccaacagatttttttgtattctataaatttcacacaatattcaaaggcagtaagtgctaagaaaaaaaagtagagcaagaaggattaaacatatgcagagggtaggtaccagctggagagagaagagagacagacagacagagtcagagagagagcaagagagagagagagaacaagaacgagcaagagagagcaagcgagccggcaggactagaacacaactgagggtggagggtgccggcaacggacgagtcgagtccaaggtcagggtaggcctcataggccactgtaggggagttcttataattgtataaccccaagagtagacaagaagcacacatcccaaaatacgttacttgtacatgaaacatccaggctccattaaaattaaaaatctagccgggcacagtggctcacgcctgtaatcccaacactttgggaggctgaagagggcggattacttgaggtcaggagtttgagaccagcctgaccaacacggtgcaaccccgtctctactaaaattacaaaaattagccagacatggtgatgcacacctgcaatcccagttactcaggaggctgaggcaagagaactgcttgaacccaggaggcggaggttgcagtgagccgagatcaccaccacacaccagcctgggtgacagagcgagactctatctcaaaaaaaaaagttgttttagtatttctcaggtacccgataggtcatcttagaaggagcccaccttgaagacactgccctaggctggtaaaacttggacagttaacactgcattcctcagacaactgggagcactgcagaggtctgcttccccaagcccctgaacgacagcctgggacttccctgcaggcctgaacacaagatctcaggaaatggaagagttgaaccgaaagagtttttgtatttttccactcaagacttttttattattatttttttagaaggagtctcgctctgttgcccaggctggagtgcagtggcccaacctcggctcactgtaacctccgtctcctaggttcaagcagttctcctgcctcagcctcccgagtagctgagactgaaggtgcccactaccacacccagctaatttttttctatttttaatagagagagggtttcaccatgttggccaggccattctcaaactcctgacctcaggggatctgcctgcctcagcctcccaaaatgccgggattacagatgtgagccaccgtgcctggcaagagattcttaaaacctcttctggtgagaagtgaggcacctgaccaggaccaatgggatttggtgacttggtctcacacctgctttctctctgttggaagggttgctggcctctattagaaattttaattactatctggcaaaaatatgttctcctttctgactgcttaaatatgtaagatgggtccctcagtgctagctaacctcaaaactcaaaactaaatcatcttaataacataaacccttatctctgtcttgacagcagtaacacggagctgaacagtcagctaccagcatatctcatttcattgcatttgctttgctgcgctttgcagatactactttttctcacctagcaaactgaaggctttggcaaccctacatcagggaagtctactggtgctttttgttctttgtttctgctttcttcagccctttttctgtctatgaagccaacctcctctactgcactcattggaatgcttacatttattctacttcataaggtattgcccaattctagaaccacaaataaagccaactgaaatctttaaacgatatttgttgtaattgtgtcttctgacagaaacacaactcaatccacgcacaggtcttcctgcctcaacctttgctaacctagcacccatctaccttccccttggctatcaaaccaatgtttctgaaactcaattctggtaacatcccttttctacttaaaactcccattagctttttcatccaaactataatgacagcgatactaatatttattgagtgctaactgtacaccaggtactgctgtaagtattatacatatatgacaatattcctacaggataggcactattattacctcctcttttataagtgagcaaaccaagagacaaaggtgttaagtaacatctgttcaataaagccacagacttggccttcatatccctgggttccacatctgtggtttcaaccaaccacggactgaaaatatttggaggaacaaaaaaaggatggttgcttctgtactaaacatgtatagaattttttaagtctttattccataaacaatacagtataataactatttacatggcctttacattgcactgaatactataagtaatctggagacgatgtaaagtataagggaggatatggtctaaagtatgttggaggatgtgcataggttacatgcaaatacgacaccatgttatttaaagaacttgaatgtgtgtggattttggtacccaccgatggtcctggaaccaatcccccacgaatactgagagaggactatgtagttagtttcagaacctgcatttaaactcaggctctatacctcaaaataaaaagctatttgacatggaaattcaattaatcaacagagttgtctttgaccctctacctatcaaaaactactgacagcacaaacgattcagaactttcaacagagaaaagagaaggtgtccagaaaggaatgctgagtctctcttaacacagctatcaaatcctgaatgcctcacaaacatcagatcagccatccatcaccaaaatgggagggggaggtaggaatcgaaactgcagaatgacaacaaagaagaataaaatctaacaactcagcaacaatataccctcaggttagagataaggaagaataaacaattcagtctgaaaggacttctaccaagaagagattagtaattagactgaatggctgtggttcaatataaagtatagaaatgcaatttttttccctctaaacagaacataggcacaaccccagaagttactcaagagggctttaaaaaagaaaacaaactctaaaacaaagagtatctttaaacactaatcattgtttttttttctaaaatcactattagaacactacctgacaaggtctttaaagggttcactgttgattaagccattttcatggcctagtaagtttgagttctattaattcagactgtgctatgtacactgaaattttgtcttaggcaggctcaacagaacagttcttcaaattaagcaagtgcttaatgttaggtagaaaaaatatgtcgctgtgaaatatatactgtccaagtactatttggtgccaacaaaagctaacaaacaggctgtgtttttaagtctaagcagaagaaaagtaaccactacctgtacagaatacagttcggctctttcagtatttcagataaaaagaaggactgaaaccagaaacaacctactttctagctctgaattaccatcatcacattgtataaatcattaggtggggacagaatacaccaaaatagaaatcacaagctgaaagagccttgaattccttcccttaaatgaagctcttatatcaaatgaatctatatagtctctgtgtgttccagcattttgtcaacttgtaaatcaaagattttgttccatagcccttctcaattttctacatttaacatctgacaaaaaccagcttttatctttaccaaagatattctatccctagaaagtcactatttaaaatgatgtcatttatatcatgtaacatattaagaaatacatttattttatttttggtagtaacaaaacaaccctggatatttgcataaattaaagctgtcaataagaaaccacttctatatgtatccttctttgggtttctggctcaggggttggcaaaaatgggttatacatttaaataatatttcaatcttaggttaaggaaaatttctcctgtatatttcaagatacagagagactctgccgatttacattcaaataaaacaaaacgtgagtaatactgtctatatcaatgttctgtcacttgccagaataaagaaaacatttagtaagttagttaatttcaagtctgagaattaagcaaatatcccaaatcctttgtaaactcaaagatttagttactttctctacatattacacagctgctttaaaattttaccttctggccgggcgcggtggctcacgcttgtaatcccagcacttcgggaggctgaggtgggcagatcacgagctcaggagttcaagaccagcgaccccgtcgctactaaaaatacaaaaattagctgggtgtggtggcgagcacctgtaatcccagctactcaggaggctgaggcaggagaatcccttgaacccgggaggtggacactgcagtgagctgagattgcaccactgcactccagcctgggcgacagagctagactccatctcaaaacaaaagaaaaaaaaaatttaccttttatttctagatactttgtaaaaaaaaaaaaaaacaactcaaccttctttcctagaaactttctaattaactttctacttttttcgttaagaaaactcctttagtttacacaccaattctgtataaattaaaaacacacaatttcaggtgaaagttctaatgagtagtgtatattttgaaaacacgaatgcttattttacattactctgtgattagaatgaaaaaaacatagatgcacaagtggtgacagaagtaaacctaatactcaataacaataatcaaaggcaatacatgatactcgttcctgtctcactagtgcacattagttttaacattactgaaagatgtgggaaactcagtattttctaaaactcctgatttatttccaaaggaaaaatagttgtaactacgtcaaaataactattttggccggatgcggtggctcacgcctgtaatcccagcactttgggaggccaaggtgggcggatctcttgaggtcaggagtttgagaccaacctgaccaacatggtaaagccccgtttctacttaaaatacaaaaattatccgggcatggtggtgggcgcctgtagtcccagctactcaggaggctgaggcaggagaattgcttgaacccgggaggcagaggttgcagtaagccgacatcgtgccactgcactccagcctgagcaacagagtgaaattttgtctcaaaaaacaaaaattgcaattaatagtttaaaatattaaatctaaatttataggagattcattagtttgcccttggtaatccccactttctgccttgtaaagcctaagaccctaagaagctctacaaactagagcttcttaggcttcaaaacagttctttccaaaccatatttgatgaattatatgtaagatgagtcaataacataaggattagatttccctgaaaatgcatagaaggttaaaaattagaagaaaaagtgataggcataataggctctgggttttgcttaatgcaaacgttctgaaaggttcaacattaacacagacattcacaaatgaggcatctaattttaactttgttttaaaaagttgtttaaaaaaaaagtcaaaataagtcaaactcttcccatttgtttgaatagagggtacatttacttcctacccaacaagatttgaaaacaaaagacatattagctataaagatatattcctttcacttaatgctccacaaatgtctgaaaagcaaactcaactcaatttagttgagtcaataagggaattccagttttccttttttcttttctttttttttttttttttttttttttgagacggagtcttgctctatcgcccaggctggagtgcagcagcgtaatttcggctcactgcaagctccacctcccgagttcaagcagttctgcctcagcctcctgagtagctgggattacaagcacacgccaccacgctcggttaatttttatatttttagtagagatggggtttcatcaccatgttggtcaggctggtctcgaactcctgacctcgtgatccacccgcctcggcctcccaaagtgctggggttacaggcgtgagccaacgcgcccggccaggcaattccagtttttctaagacagtattgtaaaccaagcagagatattccctagggccatataattctgatacattagctaatctttgtaagccaaatcagagcacttctttccaaaactcacatttctaccaaaccgggacaccgtgtggtggggaaagagttcagaacacctggtatatttttccaaagcaaaatttaactttccattgccaggagaagcatgaacatgttgacttatactgccctctagagtctccttctaatattttttagcctgaaataattaattctaatcataagactcttctaattactcaagctttcagtattctaatattgtaaactgacgtttatttatttatttattgagaagaagtctccctctattgcctaggctggagtgcagtggcacgacctcagctcactgcaacctccacctcctgagttcaagcaattcccctacctcagcctccagagtagctgggatcacagccatgcaccaccacacccagctcatttttgtactcttagtagagacgggttttcaccatgttggccaggctggtctcaaactcctgacctcaggtgatccacccgcctttggctcccaaagtgctgggattacagcatgagccactgggcccagccaactgaccttttttcagtggattagtagtcttttttttggagggcgcggggtggggggaaaggagtctcgctctgtagcccaggctggagtgcagtggcgcgatctcggctcactacaacctccgcctccagggttcaagcgattctcctgcctcagcctcgtgagtagctgggattacaggcatgcgccaccatgcgcagctaattttgtatttttcatagagacagaatttctccatgttggtcaggctggtcttgaactgccgacctcaggtgatccgcccgcctcagcctcttaaagggctgggattacagatgtgagccaccgcatctggctagtagtcattattaaaacatacaatatttcaattacccactgttttttatttttttgttgtttgtttgttttggacagcgtctcgctctgtcgccaggctgttgtgcagtggcacaatctcagcttactgcaacctctgcctcccgggttcaagcgattctcctgcctccgcctcccaagtaactgggactacaggcacgcgccaccacgtccagctgatttttgtatttttggtagagacggtgtttcaccatgttggccaggatggtcttgatctcttaacctcgtgatccgccagcctcggcctctcaaagtgctgggattacaggtgtgagccactgagcccggccaattacccactattcttaaaggtcagcagtacttccccaaaggacaggaatgcaccccaaacagaatcttctaatttgcttatttaaaaaaagttttaaatagctcaaactgcaaagacttctaaaacaaagaccacttgtagcatatattaattaatccatgtagcccagagttttgtctagcaaaacccaagttcacacatttgaccacatgcacacgaacctcagccaacgcagccaacgctccccagaggctacttctgcagctaagcatctgtcctttcagctcctggcagttcctgccttttctcttgccaggcaaccagagctctaaagggatcttaatgcactaatgagaagccatgacaaccaagacctgcggtagctgcaaagcacaaacaccagtatccacttttactgagcacgcatgcaataagcaatgtgctaaggaatccaagtaaattaaaatcattcctctaacctaataactccataggcacctataacacaccataacttgaaactttctatcattctttatatttaagaacttattaaaaggcaggctttaccatgcaccactggtagtatagcttgcctcagctgttatagtaactatagaagtagggttattttcttgtttgtttcaatctagagtcataagagaccatcaaaaaaaaaaaaaccctattgaaaccatgtttagagcgaaaaagtctatattctttttaggggattagtagtcaccattaaaaggtatgatatttcaattacccacagttatttgagatcagcagtatttcctcaaaggacagcacctaaaacggaattttctctaggcacctgtggtataccataacaccaaaaagcatccctcaaaaaagaaactaaaactaagatgctatgctccatacccagatatctgttattacttctgaaaacaatctaagtaatcttggggatcccatccagtagataaaaacgatggcatcctttggggcataaagtgaaggtaagatttccacaggctctgaaacagcagctagcaactagggccaagagactgcacctgtttttgaaaataaacttttatagccaggcgcagtggctcatgcctgtaatcccagcactttgggaggccgaggcaggtgatcatccgaggtcgggagttcaagaccagcctgaccaacatggagaaaccctgtctctactaaaaatacaaaattagctgggcatggtggcgcaagcctgtaatcctagctactcaggaggctgaggcagagaatcgtttgaacccgggaggtggaagctgcggtgagctgagatcgtgccacaccattgcactccagcctgggcaacaagagtgagactccatctcaatcaatcaatcaatcaatcaagttttattagaagtcagctacaccgatttttttttttttttttttttattgagatggagtctcgctctgttgcccaggctggagtgcagtggcacaatctcagctcaccacaacctctgcctccctggtttcaagtgattctcctgcctcagcctcccaagtagctgggactacaggcacgtgccaccatgcctggctaatttttgtatttttagtagagacggggtttcaccacgttggccaggctggtttcgaactcttgaccttgtgatccacccgcctcggcctcccaaagtgctggggttacaggcatgagccactgcacctggccttatttttttatgtgtattttctatggttgtttgtcttcccactacaatggcagagttccatacttgaaacagagaccatacaacctgaaaagactaaatatttactatatctggccctttacagaaaaagactgccaacagcaaacatctccagccttctccagatcacaacttaagaggaatgtcatgtgcatgaggctaaggagtgtgggctggcttgagatggaaaaggggattatgactgctatccaccctatactacatattaagaaaatgaaattatgggaactcatgggaagaaagaatgacagatgcagctgattcctcccatatgatggttcacatcaggcttttccaaagactgaatgaagagctctaaggttttctttcaggtatttaaaaaatcttatgtaagggatggcaggggaaaataaaattttctatataacatactatttcactcacatcaatgttacactgaagctcacacctgagataggctgatatttctttcaaagagaagatttcaagtaagcttccaaatagctatgataatgtgtatgaatagaaccagatcccagaatgaacttgaggtaaataccaaggactgaaatcagtgaaccatcaaaacaaatatacttgtcaaacatacaatacacaagatgaaatataatgaatccctttgaaggtcactatatgtagatacaaaaatacagcttgaagatgatctagtcaagagacccaggttctagtccgggttttgactctccctgtaacttagaaaagtaatttcccccatttgtttttggggttttttttgtttttgtttttgtttttgagacagagtctcgctctgttgcccaggctggagtgcagtggcgcgatctcggctcaccgcgagctccgcctcccgggttcaccccattctcctacctcagcctcccaagtagctgggattacaggcatgcgtccccacacccagctaatttttgtatttttagtagagacagggtttcaccatgttggtcaggctggtcttgaactcctgacctcaggtgatccacctgcctcagcctcccaaagtgttgggattacaggcatgagccactacgcccagtctggttttgttttttgagacagagtcttgttctgtcacccaggctggtgtacagtggtgcaatcacagctcactgcaccatctacctcccaggctcccaaagggctaagattacaggtgtgagccacagtgaccagccagtttcccctttgtactttatctgtgaactgaaggactaacgctgcatgagtggttctcaaccattcacatgcctcagaatcacctggagggatttgttaaagcaaggggtgttgggtgccaggcttcattttcagttcagaagtcatcattcccatcctcacagcaagaaaacagctaaacaaactgaaatcaatggcctttcttagatccattagagaactggggtcacagagcaaacagctaccacaaaatttgaaggaaaaaaatcacaagaaaatacagagaatcacagaaaagatcagattaccagaagcaaaagctacatgaaccagtaagcaatacagtaatcaatacctgaacggtaattttgacgaactgcagaagactgagtgtggactagcttgagagttaaaacttctggaggtccagacttaagagggacctatatagcttttacctccaggagcctgaacaggttcttacaagaacatcaaagaaaaaaatcccctcgtattttaggcagggagaggggaaagtaaccattttgcaattgctcagagcattctccataacaaaggcccacctgctaagaaaaactacttcgcaggagctttgtagacctggggaaaggacaattactcaactccctcttgccttctcacagaaggggtgaggggaggaaagctaataaactcttcggaagatcacagcctaaagacttacgcccactaaaaaactgagatttaatattagattacagaatgcactccttccccaacacctttccaccacatcaacagagctccagtataaaaaaaaaaatgcattacaactgacagagcttcaagacagactctatttaagaaggagttcttagggaaacccaaagaaaccaggggtggaaaaaaacaagaaaactacaggaaacggaagcatctaacccacagcaaacatgaagcacagtatggcattttctgaaaaagctaaacataatgtttttttgtttgtttgtttgtttgtttgttttgttttgtttttttgagaagagtcttgcgctgtcacccaggctggagtgcaatggcacgatctcgactcactgcaagctctgcctcctggtttcatgccattctcctgcctcagcctccccagcagctgggactacaggcacacactgccacgcccggctaatttttttgtatttttagtagagacggggtttcactgtgttagccaggatggtctcgatctcctgacctcgtgatctgcccacctcagcctcccaaagtgctgggattataggcatgagccaccacgcccagcctgaaaaagctaaacataatcttaccatacaatcccacaatcgtgcccctaagcatttgtccaactgacttaaaaacttatgtccatacaaaaatctgcacaaattttagagtagttttattcataatcagagacagaaggcaaccaaggtgtccttcaaccgtacttcatgaatagatatgcgaactgtggtgttcactgagcaataaaaagaaatgagctctaaagaacaagaaagaggaacattaaacacatattgttaagtgaaagaagccaatctgaaagtatacacactatatgattccaaccatagaactttctttaaaaggaacttcaactttctttaaaagacaaaactatagagatagtaaaaggaccagtggttgccaggggctgggcaaagaagggagagatgattacatggagcacagaagttttaatggtggtgaaactattctgcaggatactgtaactgtggataagcacatgacatttacgtttctgtcaaaccccacagaatgtacaacacaaagagtgaatcttaaactgtagacttcagttaataatatattaatactgcttcatcagttgtaacagataagccacactcatgcaagatgttaataatagggggaactctgtgtgtgtgtctgtatatgtgtgtgtgtgggaactacttatactatctgcccaattttcaatttttctttttttttttttttttttttttttttggtttagatggagtcttgctctgtcacccaggctggagtgcagtggcgctatctcagctcactgcaagctccgcctcccgggttcacgccattctcctgcctcagcctcccgagtagctgggactacaggcgcccgccactacgcccggctaattttttgtatttttagtagagacggggtttcaccgtgttagccaggatggtctcaatctcctgacctcgtgatccgcccacctctgcctcccaaagtgctgggattacaggcgtgagccaccacgcccagcccgatttttctataaatctaaaagtgttctaaagtataaagtttatttaaaaaaaaagagagagagagagagtgagtgttgggagtcactcctcgatcctaattcagtaagtcttgggacaggcccaataatttacattttaaccaaattcacaagtgctgctgctggttcaagagccacatcttgaaaccactgggctacggctccttttagttctaaattttattattctattcactaacattttcatgagaactgtggtaaccagcccacaaaatggcccccagtgagctctgcctcctggtattcaaactcttgacaataatgtcttccaaggctacgtcataaaagacattgcagctttcaccttgctcttatatgaatcctttcttctggaaagccaggtgcagtatcatgaagaaactcaggcagccctatgaagaggttccatgtgcaaggaactgaagcttctgccaacagccagcaagaactctgccaaccttgtgaatgcactatgttgcaattggatcctccaggccctatcaagccttcagttgactgcaacctgagaagggacctcaagccactcctaaattcctgacccacaaaaggtgtgtgggataacaaatgctgaatgttgttttaagcagcagtttggaggtattttgttacatatatcatataggagcttaatctaaaatatgtatgtggctgggcacggtggctcacgcctataatcccagcactgaggcaggctggatcacctgaggtcaggagttccaaaccagcctggccaacagggtgaaaccccatctctactaaaagacacaaaaattagccatgcatggtggtgggtgcctgtaatcccagctactctactcgggaggctgatgcaggagaattgcttgaacccagaggtggaggttgcagtcagccgaaatcgtgccactgcactccagtctaggcaaaaaggtgagactccgtctcaaaaattaaaataaaataaaataaaatgcatataatataactgttattgttgacccttcttgcctttactttgatacagctggagaagtcctgaaaatgtgtccaaattcattacaaggtgaagatcaatttaaagaactcctccacatttctcaaagtattatattaataatgaattatatcatttcttcaggacataaaggatttggggtgggaggagaagggaaaggaaggaagtggaaacgagattttcatcatcttccctaagccattgctggtcatcctagagtagaaatctgagagtttcactttattgcttaaaatcctttaatattatagtttcccaaagcttatggaagtgaatccagacactgctcattgtctgcactacatctaccaagcaggctcatgaggcagcacaaggggtgcacacaaacatgggctgactttgcaagaccttggataagttacttaatctccctgcctcggtctgctcaacagtaaaatgaaggtaattatactaccaatatagttactatagggaattaatacattaaaacataaaaaacacttaaaagaggacgttgcctaagtgctcaataaatgtcagctatcatcatcatctgccattgcatctctcataacccagactatttcaagccattatgaactactggaattttcaaactcaccaacactgttttatgcttttgcaccttagaaaagggactttctctgtctggaatggccttccttcacttctctctcaattatccttctcaacttccttatatagccttctctgatttcccttttacttaccgcatccctcatagacacacctacagagaatatttaaattatttattatttgcctctcccacaaaattgtatgcttgataataatacttgatacttattgtgtcaagtactgtgtgccagccactgttttatattaagcactttacttagactatctaacttaaacttcttaataactcataattatcctagttttattgacagtaaaatctataacatatataaataaagaataagaattcaaaccttagctgtttggctgcaatttgttacaatctaaaatctaaggactaggaggtggagatttctgacatgctgaaaatatcaaggaagcaattaaaccttccagcagttagcataagtgcacacagtttaaaaatttataatatatatgcatggtactgtaggtgggctaccccacacccccagtcatatcagcttcttgcttatactttctggagatatttcatgcatatacagcatgcacacacatatatgtacatctctttgttacacaaatagtagtatacttcatatagccttctgagcccatttttacttcctgtatctttgagattgttccgtgtcagtccatacaaagtgcctcattctttttcactgctgcagagaattccaccatattccataataatatggtttggacttgtgtccccacccaaatctcatgtcaaattgtaatccccagtgttggaggtggggcccggtgggaggtgattggatcacggggcggtttctcatgaatggtttagcaccatcccctcggtgcgaagttcccatgagatctggtcgtttaaattgtatagcaccttccgcctctcttcctcctactccagccatgtgaagatgcctgctccagctctgccttccaccgtgagtaaaagctccctgaggcctccccagccttgcttcctgtacagcctgcagtactgtgagctaactaaacctctttcctttataaattgcccagtcttcagtatttatagcaatgcaagaacagactattatatttaccatattcaaccactctcctatattgtttgtagccttttgttgtaatataaaatcctaaagcaaaatccttatacacaaagaaatggatagaggatgattctacagtaaatatggtaaatgtatacgctatagcaaatatagtaaaatgcaactgtagaatctaaacggtgagtgcaggggtgctctcactatcataattcctgcaattgttctgcatttaaaccatcagtttgtttgtttgtttgtttgtttgtttgttttttggagacagagtcttgctctgttgcccaggctggagtgcagtggcacaatcttggctcactgcaaggtccgcctcctgggttcatgccattctcctgcctcagcctcttgagtagctgggactacaggcgcccgccaccacgcctggctaattttttgtattttttagtagagacggggtttcaccgtcttaaccaggatggtctcaatctcctgacctcgtgatccacccacctcggcctcccaaagtgcttggattacaggtgtgagccaccgcgcccggcctatacttgttcttaaagtgagcatcatgtttttctttcaacttctcaataaattgctaatatgaaatattttatcaacttcaaaacaatccccaaatttcaaaaatataataatcttggaatgtttgttacccttggcttatatcatagaagaacagaggaggcaattatcagaagagtcacatttcaacttccatcattttacccaagggacagtcaagtaaagtaaaactgccctaagtgtcttattttcttgggtctctcaacactcttttaggcaaacacttggtcttcaccaagaacaaagagttataggtgtctgttacctctaggagaagcaagggggaaaaaaaaaaaaaaaaaaaaaaaactaaaacctttggagagtcattgtttgacatcttccttctcagcttccttcttatataattcccaggagtcctagccaataaagaatggtttaactcttctttctgaaaaaaacaaatgattatctttctttagaaaatgtattcctctttcctctgaagactcagaagcagacctttcaggagaatttctggattagagtgtgccatttcagccaagggacttcctctaccagggtccaaagataacacattctaatgaatgcttgctggactgtttcctttttttttctgacaatttgaaggtcttcaatgaaagcatgccagtattaccacagacttatcttagggcagtgctttggtaaaccaaattcagaagctttagaaaagactagaaactaataagtcagctatacatccacttagagtttgccagacagagaaaaaggaaaataacattccagtcacaaagaataaatcacagagggctttaaggcttaattgccacgttttccctccaaaagaatcaaaagtttatcacacttgtttcctaaatctccaaaaatgtgagttattgagagaagagtcatacaatttttaggaatttccatttcttccgttgtcgaacctttgaaaaacaattgcaagttgaagagaactcacatgacccagaaactgttctgagctctatcaatgttcaggaagcagaattttttttttttttaactttttaaactctttttgtagagacaggatttccctatgttgcctaggctggtctccaactcctgggctcaagtgatcctcctgccttggcctcccaaagtgctaagataacaggtgtgagccaccacacgtggctggaaaaaaatgttttcatccagagagtaaaactcaatgaagtggcacagcacgcagtacatttcaactttcccctcttaaagatttcagcctacacactccaatttcacactcaatgaaagcttaagcaaaatgttagcataaatcaaagttttaaatcattttagattgttaactagcaaatgtcctgcagaaattttaaaactcactaaataaattataaatctagttatgagaacaaagcacactgtggaatataaggatgcagaataaacagctattcagaaagtgtgtccaatttttgtcccacccctaagtcaagaggcaaaccatgaccccgctgtgggactgggctgtcaagcactctccctcctctgctaacgctgttgcctctgttcagaagaccttccctgccctctcttcacggggcaaacctacacctctcctccaagatccagctgagcctttacctcctctgtggcccctgatcagaatccccaaggcagaagtttttggagctttattcgtgcctttcttttgttgttgttctttttttttatttttttgagatggagtctcgctctgtcactcaggctggagtgcagtggtgtgaacttggctcactgcaacctctgcctccctggttcaagtgattctcctgggctggtctcaaactcctgacctcaaacaatcctcctgcctcagcctcccaaagtgctgggattacaggcatgagccaccacacccagcctattcacgcctttctgacacctaccactcactataacacacttaacaagcctcttcccattccccacccctcaaggcagagcctgcagccctggtcatcctctatccctgacacccaccacattgcccagcagacaacagcacagtcagtagtcccatttactaaggacttacgtgccagacactatgctcagtgctttatataatatcaactcatttcaccttcacaaaaaccatatgaataatataataataaactatagtatccctccaatcagtcttccccagcctccttaggaggttccttttcatgtgaacaggctgtaacctacaggactctatcctgaccatactgtcatcttgttcctcacactcttcctgggcaatctccaatccaggtctttggagctcattccaaacccatataggacaggcacttggatatctgagtgttctgcacttaaaattggtcatgtcccaaactctgtccatctctctccccaaatatgctctctctttatgattctaacagaacactctatgtccagtcatagcctaagtccaatcaggagaaagaaactacatggtaatttgaacaagggaagataaaaaatcattaactataacaaaagattaatgagaagttggcaaataagaccttgaaagaacacagcaatagctgacataaaatatagtagcaaatataatattatgtaacacaacatataattgccaccacccttaaggctgagacagagcacccaagaaagagttcccccaactctagggctgagatccagaccttgctggagggggctcatacctgacagaacttcaggcaatccactctgtgaaatttgccagaaatcagtcctctagaatgccaaggaaagttgtttgtgggagagtgtctcagtggacgtactctgctacctgggcagcaggagagctgctggtcactaagagctgcaaatgcctgagcactgaagaaacaccatgtgccacactggcctctcttggaaccagcaagtaaatctctttcctcctcaatgtctctccagcaccctctactgacaaaactaaacatcgtgccagctggcggaggaaaagcaaaaggcccagattcattttcacagagcaagcaatgaaggacatacttcgaggtgagaagcaataaatcaataactgacacaagcacacaatcatctatcagttgtctaagcccaaaacctagaggcatccttgatttttcctccagtcatcaagtcccacaggtcctaccttctaagtatttattgaatccatctacttcactccatccacttcactccattatgattaatgttaataatactgatatattaattaattatattatataataaataatatattattgttaataatagtgttaatccccccgtccagttttacttgcttgctttttttattctgttttgcctctgggccactgcacatgggtttcctctgcccagaacagccttccttctttcccctattgccatatccactttttggttagctgattcttcatcattcttcagctctcaactctcttgctccaagttacttgcccctgctaagtacacccaaaagaatcctcttcttccccactaagaacacttaccacacattattgtacaatcacatgttgcttaacaatggatatatgttcatccttgtgtgaacatgatagagtgtagttacacaagcctagatgataccctatagcctactgctcctagactacaaaactgtatagcatgttacagcactgaatactgtaaacaactgtaacacaatggtacatctgtctagggcacttaccccatgaatggagctcactggaagttgctctgggtgagtcagtgagtcagtggtgagtaaatgtgaaggcctaggacattactatacaccactgtgaactttataaacactgtgtgcttaggttacactaaattcctcttttaaatattattttttcttcaataacaaatcagccttagtttactgtaacttttttactttataaaccatttttaaaactttttgactcttaacaactcagcttaaaacacaacacgaatacattgtgcagctctacaaagatattttatttgtataatcttattttataagctttattctatttttaaattttttaacttttttaatgtttttgttgaaaactaacacacacacattagcctaggcatacacagggtgaggatcatcactgctgctcttgcaccgccacatgttggaccaatggaaggtctccagggtcaataacatacatggagctgtcatctcctacaataacaatgccttcttctggaatacctcttccagaatagctggaggctattttacagtgaattattttatatgtaagtagaggacgtacactctaaaataatgataaaaagtacactatagtaaatacataaaccagtaaaacaatcatttataatcactatcaagtattacgtactgtccacgattgaatgtgctatatttcatataaccggcagcatattaggtctgcttacaccagcatcaccacacacatgagtaatatactgggctacaaccttataccacatacaatgtaactaagcaacaggaaattttcgcctccattataatctcatggaaccactgtcatatatttggtgtggtccaccattgcccagaatttctttacacagcacatgaccataattccttattaactaactctcatcattcatacttttacctctatgaaggcaagaaaaatttcttcatcactgaatcccaaagagttagcaagatgtctagaacaaagcagacactcagtatcagctcagttaatggatgttgaatgaaggggggtgacatggttaggcattgtgtccccacccaaatctcatcttgaattgtaaaccccataatcctcataatccccacatgtcaagagagagaccaggtggaggtaactgaatcgtggagccggtttctcccatgctgttctcgtgatggtcagtgagttctcataagatccgatctgatggttttataagaagctcttccccacttcgctcagcactcactctgtcctgccaccctgtgaagaagatgccttgctttcccttcaccttccaccatgattgtaagtttcctggggcctccccagcattgtggaactgtgagtcaattaaacctatttcctttataaattacccagtcttagacagttctttatagcagcaagaacagactaatataaggggaagcattttatgaagcaaataacaacttaaaaggagaaaattttggctttgagattatatctgatatgttgatcagtgtacatgcaataaaattattacacatatataactctaaggataaggagacaatgcctttgtctcatgcctaacaattaagatacagtaaaatataaagtctattcctcaaaagaaaaagaactaattcaaccagctggcaatatgaatttatatgatttcagtatattgtatgcagatgaggaaaaagactgttagttttcaaggtgaacagtgccatcccagtgtagtatgtatatatcaaaggattctgtttatttacacccaataatgaaaatcaaatattacaacatgacattccattgcacaccatgcttctatggtagaaaatcaatacatcctatttgttttcagtaacttgtttacccaaccacagttctagagtcattatgcaatgcaaacagtcttctaaagcactctgacccatatgaaataaaaactaggtcctctctgacactcccaaagggaatatctctctggctaactccaggaatttgctcagggatatatggagcaaagattgtagagctgaatcggtatataaagttactctgacactctgggaggaaatttagccaaatccgtaatagtgagtagcaatctcatccactcaatggccaagggaaatatattcaggactagaactcacacaagccaaagcactaaaatacacaaagtacaaccaccagcagtgctggctcacacctgcgatcccagcgctttgggaggccgaggcaggcagatcactcaagcccaggagttcaagaccagcctaggcaacatggcaaaaccctgtctctacaaaacttacaaaaattagccaggcatgaaggctaaaattagccaggcatgatggttaaaaattagccaggcgtgatggggtatccctgtagtcccagctactcaagaggctgaggtgggaggatcacctgaacctgggaggttgaggctacactgagctgtgatcatgccactacattccagcctgggtgacagagtgagatcctgtctcaaaaaaaaaaaaaaaaaaagtataatcttgaagatttaagcttttttgttgttattgcttatttatatcattctcacagtctaaaggggggaaaaacttaggatacaaacagacgttatttcagcaactcaatcattgtttaatcctcgagacatattgtggacaactgtattatagaatttaaaagtgtgtgagtttattacacacttgtttaaaaaaagacataataagtatgcagtctattcgagctgggcacagtggctcacacctataatcccagcactttgggaggctaacatgggaagactgcttgaggccaggagtttgagaccaacctgggcaacaaggcaagaccccatctctacaaaaaaattttaaaaattagccaggtacaggggcgcgtgcctgtagtcctatcttcttttttttgagacaaagtctcactctgtcatccaggctggaatgcagtagtagaatttgggcttactgaaaccactgcctcccaggctcaagcaatcctcccacctcagcctcccgagtagctgggactacaggctaatttttttttttttttttttttagtagagacggggtttcaccatgttggccaggctggtcccaaactcctggccccaaggaatcctcggcctcccaaagtgctgggattacaggcgtgaaccaccgcacccagccacacttggccatttttaaactatttttattccaactgatatatatttcatcttctataacatgtctcagtatagacatgcatagtctgatcaagaaaatcttgtcaataaaatgaaacttaacaagggccttggggatattctctctaccaagactgatctttcctttacttctacagggctcagtccctcacttatttgctaaaatgtcacctttccccagttattctttaggcccaccatgaccacttactccctcagccaaatctcagcttgccatttcccctgtgcctgcttgacttttctccagagcacttttcaccatcaaatctttacttatttgtatattactgtctgttttctcccactagaatattttctccatgaattaaggaatatttgggtttgtttcacttgctgctgcttcctcagcacttagaactgtgtgttgaagcacagtaggtgctcaataaatagtggttgaatgaaagaaaatagacagtcccagaaattaatcttaatactgatgctgtgaaatgaaaagctctcaaagtgggagtggacatacttttaagagatgattccctttcatttaacttaaagcccaaaggacttttcaaaatgaaattgttattccaactacacccaaaaatcattaaggctgcccctgggtgctcacgtacgttttaacaaaaagcaaggaattctatgtcctgctaaagcaatggaaaaccctgatgtagaaaatgtaaactgcttaagttccatatgtgggtagtaacgatttacaccacaccacttataacattatgagggtcacactaaccacagggagaattccgtttcacctttgtttttccacatacatgccctctaataatacaactcttcacaaacactgtattagctgcattcttaaacacgcctactatctaaaacatacacagcaatgtaactgatgggtacattctcaatcaggtaattttgatagaaaaagtataccaaccagtgtgccatttggccattaaaacaataggaaagacagaactgatctaaatagctcataatatggtctaaaagagatgaccttcaaactttagcgataaaataagaaaacacagaaatagaggtgttaatcagttaacagaagtcagtaagctaaaacgtacaaagttctacactgcattttgtggtaagagacaaataaaatatatgttccccatacaaaaagacttcttaaatctattaagatggaataaatagtatgtacaggataatggagacaaatgcccatagtctaaaatggaaaacttcaaaatcacctagacccaagaaaacaaaaatcacatattaggacaatttgattttcccatgacatacgtggcgctgtagatgcagtttatcctacctccagtcaagtgggtccatgaatagaaactctcaggtataaaccactcctctaccacttcaccccagggcattctagtgacttccatggtgatttggtttggctgtatcctcacccaaatctcatcttgaattgtaatcctcataatccccacgtgtctagggagaggcctggcaggaggtgattggatcacagggcagtttcccccatgatgttctagagatggtgagtgctcaggagatctgagggatttataaggggctcttcctcctttgctcctcactcgctcgtgccaccttgtgaaggtgcctgctttgccttttgccatgattgtaagtttcctgaggcctctccagctacatagaattgggagtcaattaaacctcttttctttataaattaaacaggctcaggtatttctttatagcagtgcaaagacagactaatacacatggttacgtttctctcaactactgacacttggcatgtccagctattataatttcatttctatctcccaaatgttttccatctgtcccattccattccagaccaccgttggcctaggttcagctgtcatgatcgcctggctaaactgcaaaaggaggtgcgatgacattatactcctgcttaaaacttctacaggattccacggttcactgaatgaagtctaaactccttaatactctaatatacggattggacctctgtcctcagccccttctcttccaggcttgaacctccatgtcttggcatacatacttttccaccccctaacatatattccctttcttttctgttttaaaacatctttcttactggtcgtgaacggtggctcacaccggtaatactagcactttgggaggctgtggtaggagaatcgcttgagcccaggaattcaagaccagcctaggcaacacaggcagatcttatctttacaaaaattaaaaattagccaagcatggcagcacatgcctgtggtcccagctactcgagaggctgaagcaggattgcttgaacccaggaagttgaggctgcaatgagccatgatcctgccactgcactgcagcctgggctgctgagcaagagcctatctcaaaacaaaaccaaataaaattcctcttacttttgaaaggcccagtttaaatgtaacctctgtgaaaatttctttgatcctcacaatcagaattatttgttgccttcagggtattgccaaagtactctgtttatatctctgttcaaagagattgtatctatgttaacgtaaatcatagtctgatgatagcttttgtctgtttaacaaagcaccctccttactgactttactctagggaactaccacttcatatggggacctaataacatgtagtttgggtggatccagggttgctcaccatactaaatcctcctggccaccatgacttgttcaagaatggacccatgtctcagtaagaaccactgagaaccctccccataacttctgctagaaccaccagaagaagaaaaaaaatacaaagcctattttataataaatttgaatatctcatgtaacttattgaatacagaaagtgaaaaacaaaatggttatatggtactcaaagtatggtttctattgactgtgtatcatttttgcaccatcataaacttacaaaattctaagtcaaagaatcataagtcagagactatactgacatacgagtcatgatcgtggtctgacttacattacaattaattgtactcagggccaaagaaacagttataagaggacacctggcagataagagaaacagcaagaaggcctgtgtggctggggcaagcaagtgtgggagcgtgtatgggggggaagtgagagagaaggagggcaggcaggggagggaggggagagagaagagagatgggggaacaaaaaagagagagagagagagagagagaaagggagagggagagagagacagagccagacagacagacaccccaagatggcattgtgaaaggtcaagctattgcaaagtcccaagcagaagagggacaggatctgacttaactttcttttttgttttttgagacggagtctcgctctgtcgcccaggctggagcgatcttggctcactgcaagctccgcctcccgggtccacgccattctcctgcctcagcctcccgagtagctgggactacaggggcccaccaccacacccagctaattttttgtatttttagtagagacagggtttcaccatgttaacctggatggtctcgatctcctgacctcgtgatctgaccacctcggcctcccaaagtgctgggattacaggcatgagccaccgcgcccagccctgacttaacttttaaaaggatccttaggcttgctgtgttgtgaaaacaaatggcatgggggtgggcatggaagtgggaggtgggcagggagaacaagacctgttaagaacctgctagggtaaccaggccagaggtgatgaaggctcaaagaaagttttgtccaatttttttttttaaacaccctaattttttttgctaccaattacaactttggaaagacagataaatcaacacatgatattcatacttgatttactgagtatctactatatttaagacactctaaatattaccttatctagttacagaactatcttcctaaactcaaagcccatatgcaaacggtgaactggaattctctaactaaatatcccatacacattttacccccaaaacctaatcctcctttactctctaatctcattatctcattaatattatttcctagcctagttgttactaaagataataagagagtaggtatatttgagacagagctttgctctgtcgcccgcgctggagtacaatggcacaatctcagctcactgccgagaactccgcctcccgggttcaagtaattctcctgcctcagcctcccgagtagctaggattacaggtgcatgccaccacacccagctaatttttgtatttattttagtagagatggggtttcaccatgttggctagcctggtctcgaactcctgacctcaagtgatccgcccacctcagcctcccaaagtgctgggattacaagcgtgagccaccacgcccggccataactttctatattacttaagtagttgtatacaactacacataatttcgtctaaagttcaagacaattctgggagagaaacacccttatttacctctaccattttacagataacgaaactaagctcagaaaaatgcagtaacttgccagaagttattatgctggtaaatagtggagctgagactcaaacgtgggattctaactcatccacaatcacttcagtcagaaacgtgggaattatcttagactcttctctcagccccacgccagatgccctctgtcattcactctcacaccatcactatcttagttcagagcttcccatctctaaactcagttaccacaataggctcacaggttacgttgctgtatcttgcataaccctccccttccatccattctccatactattatcagatactctcttcagttccaaacacaagctttgtgctccaacgcaagtatatggttaggaaacctacagatcatggaaacagagccaaaagtgtcaagagctttcttcatcagtatgcatgcattaattccagcaccagcaacttaccaagcaatttttggcagcatcccaacttcaagattctcattaatatcgccaagtacgaaaaacctggtgattgctcaatttctccttttgtctttcttcccagccccaaaggtgtggactttaagcatttcaaggacctcatcagacctagtcccaccttcctaaattactcttttcttatccaatcaaaactgccattcctagaaggcccaaataggtcttaagtgttcataatgaggtatcagaacatacatattttaaaaagaggagctaattaaataagtgggtctctattctggtatttcataggcatgggggacagtgatgatggtaataatggctaacatttatcaagatctcggtaagctgtgtgtcaggtactgttttacttgctttacaagcatttaattatctgttcctttaatcatcagaactactccatgaagtgggtataattattattattatcacaatttttggataaagaattgaagagctggaggagttaagtaacatgtccaaggtcacccaatcagtaagaggtgccagcgctcctaaccacctcatgctaacaacttcactataatggtagactccaatagagatatgtgaaggagatcattgtgagcttattcattcattcttaaaatatttcttgggagtttattatattctgagaattattcctgccactgggaatttaattgtagataatgcttttatggaactcacaagaaaggcaccaaaaaatacataagtaaaaatgaaaacaacacaattttgctctggaaaaaaaaaaaaggataaggtgatgtagagtaatgcgctactttagactggaagccagggagggcctccctaaggaataatattgaaatgcgatctaaattataagatgaagcaaagaaaaaaacctgatggaaccgcactgaggcaattatgatgaatgcaatacacctaggtaagagttagtttgttagttcctaaaacaacagaaaggacaggaggccattgtgactgatgctaagggagcaagtggagagtggtcagagttatatcagagactcagaagtatcaactatgctggcacacagccatggaggaaaaaaaatctgtattttactcccagcagaatgagaatctggagggttttaaggaagagaacgaggtgatctatgtttctgaaaaagcaattccactcctccaactctgtgtaaagaatgaactacaggccaggcgcagtggctcacaccagtaattccagcactttgggaggccaaggcgagtgggtaacttgaggccaagagttcgagaccaagctggcccacacagcgaaacctcatctctactaaaaatacaaaaattaaccaggcgtggtggcgggcacctgtaatctcagctacccgggaggctaagacatgagaatcgcttgaatgcagaggccgaggttacagtgagccaagattatgccactgtactccagcctgggtgacagaacaagcctctgtctcaaaaaaaaaaaaaaaaaaagaatggattatagagtgatgaaagtggaagactggagaggaattaggagactgttacttctagaaccatgcctggcacgtagtcagtagtcaatgtgttcaataaatgaatgcttcaatatcaaggtaacggaagatgagggctaagacttgggtggtaaagtgctacatgtagaaaccattctgcctcattcaacatctgtgagtgtcacaaacccagtagtcttttaaaaaccagtagcctctttttccggctggaaccatggagggtgttgaagagaagaaggtggttcctgctgtgccagaaacccttaagaaaaagcaaaggaatttcacagagctgaagatcaagctcctgagaaagaagtctgcccaaaacatgctttgaaaggcaaggaagaagcttatttatgaaaaagcaaagcactatcacaaggaatataggcagatgtacagaactgaaattcgaatggcaaggatggcaagaaaagctggcaacttctgtgtacctgcagaacccaaattggcctttgtcatcaggaccagaggtatcaatggtgtgagcccagaggtctgaaaggtgttgcagcttcttcgcctttatcaaatcttcagtggaacctttgtgaagctcaacaaggcttcaattaacatgctgaggattgtagagccatatattacatgggggaacccaaatctgaagtcagtaaatgaactaatctacaagcatagttatggcaaaatcaataagcaaattgctttgacagataacgctttgattgctctatctcttggtaaatatggcatcatctgcatggaggatctgattcatgagatctaaactattggaaaatgcttcaaggaagcaaataacttcctgtggcccttcaaattatcttctccatgaggcggaatgaagaaaaccttgactatctacaatataagctgctccaaagtgcttgaaacatctgagcacacttcccaaaacaggtagtgttctgttgcccatcatgacaatctctcaataactctgaaacatacttattcaagcagcccccatttacaaacatccaccaaccctacctctgccagccctgctactggaaaaaacacttaggacatgccagggattatgccaagcactttgcatctagtctctcatttgctccttactacactctatgagtctaatatctccaaataaatagcaatctatagtaacaaaggcaatattcttataagaatcatgtttttaatacctggcacctatgggaaaacctctctgatggaagaatttaagagaagggtggaagggagcaaattccatttcttccagagtgactaaactacaccgaagtcaaacttatgctacccagttagttttgctctgatgatcctctctgcactgacaggtgaaagcacatgcagaacatgcatggcttattattctgaaaagtccaaaatactgcgcttattcctatagcaactcggaggctaaacagagacccagtgttaacttcatacagacgtcctcagagaagcccttcctttgcagttttatgttctttataattataccaaacctttagctcagaatccctttcactttaaaaaaaaaaaaaaaagaacttacattatcatctagttatatatgcaaggcaccaaagaaacaacaacaacaaagtaaatatggaaaaagacttgattctaagaagtcataatagaattttcagcacttgactgtagtacgggaactgtccccaaataactgttttaagattgcaaaaaaaaaaaaaaaagatcaattcaatataataatagttaaaacttaacacagctctttatgtggcaggcactaatctagaataacccatttaaccttcataacggccattcaagggccactattattatccccattttacagacagcaaaaagacacagaggctaagtaacttgccagtgaagtggtagggacaggatttgccttgcgtgtctgtgttcttatacaccacatgctgctactcttcaaatggaaaaaaaaaaattcactatcacccagaaggcgatcatacgatgatgaattttgactttgctttttatttctaatccttcatcataaaagaaacacttcctttgcagtttcatattcttgtactaaagcatagctcaggaacattttcatttaaaaaaagaaaaaaaatactcccagtatcatctagtagttataagagatacggaaggcattaaactacattattcctataatccttacaagagaaattcaggttcagagaagagactatcaaaatgataaacaatagtgaagtggtaattcagaaaagttcatgtttaagtttcatcttaatctttatctcattgagggacatattttaaaagtaagaacactgacaaactgagagataacgtaacttgtactcatcgtaaggctgtagataaaaacaaggtttcttaaaaccttgtgagtttcttttcctatgctacagcagatgtttcaagaaatgaagctattgcctttgtaggaaactgatatgatcaaaagaaattaaaggaaacttaccagagacagtttgtgttggaaataatttgaagtgccaaactttaaaccatttcataatttttaaattttgttttcatagatattacattacaaagaaaaattttccagaaatattttaatcaaagttctatttaaagaaacttttgattagacattattaaattgtgtattgttttaaaacaataataataatctgtcctgagctattagaaagaaatgtatagcatgttattttaataggcctaaatgaggaaggatcaatattattttaatttttaaaggtctgtttatgaaatgcaatcatccttcattaaaaatgcaagctgtgcttcagcaagaggttagcataaatgattcacagagagatctctctccagtataatcttcctctcctgggagtttccttcggatgtttcatcaaaccactcaagctactattaaaaatgcttccctgcgataaaaggagggaataaacaatataaacacacttccccattcccattcaccaatgactcttccatttgagtgatctatacctttttcagtcataggtaaaattaattttttatattccacgcatttttgcaatcgtttcttttctcaagcattttaagttaacgttattttacagtattcaaaatcagaaattcagatttttaaggtaggtttttaatcacttacctattttgacatttcagtgtgagtcttgtctttcattgaaattaaaagaagtttgccttctatttgacggattttaaaagattttaaaatgtcaactcatcaaagtcaagacactccaaatttaaattcaattctcttctatttaaaaatgctaatgaaaatggctgtttcaatgcagcagcatctggctcattataacactcagttttaactaataaatccttaattattaaattctggtgttcaatttctttcagataaataagccaaacacatactgctacaattataaatacctgggataaattacttataccatgaaaaagcatacctcttgattctctggctgctaaataagacccaaagtatgtaaaggacacacatttgaaagacccagcattaaacatttgggctccactgtatgtaggtcccacattcataggctggcaaatctttaactctactgggtcctcatgcataatgcacagggcaatttgtctgtttgtgcaaatgggccagtttttttccatgctttttcagatgtgtcaaatgtgtcaaaactgaacataatcatatacccctaattctggctttacaaagcagaccctaccttcacccagcttgatgtttttattaaggagttactgaatatatttaatcaaggtattactgcacatcatgatgtcttgtaaaggttgaaatccctgagagaatatgtttggttttaagccctaatatgtgttagggagtgtttcatttttctctcccactcccaattcctttttttttttttctccttttttaatcagcagcatcgacagtactgactgaatattttacaatggagttgcagagtatgtgtgttcaatcgtttcagcttcccagaagattcattacagttacattagaaagtcaaatcaggcaattctgcagtctggtgaaagccagcatatgaaagaaggttaatacaaaagaatttcattttagaggacatttaggactttaaaaagcaacattatgataaaattttcaagatatttgttcttgccttagcacatgctttccaggtctaatttcagagctgtctcaatgcttttctaggaaagaatgagggtgtatgggaggaaattgtttgatctacaaggtctgccatcttaatgatcctcatgctaagaacactgcagatgtatgttttgccctcactcatggggaaagaatctatggttctccaattatgctgatgaagtagaagtcaagtaaaagtgaaggtgcgttcatttaaaacataaagattttcagtgactgttaacatctgtctttctgattataaataaaactaactgctgagattttcagatcttaatatgtatttatataacaaaaaccagtaagttaattgttttccatgattagtagcaggtatagaaagatcttcttcagattggtacatgtttaactggcacttgtgtataatatagtaattcccctctttctagaattcaagcctcaataaacccctaactaatcttatgtatttatttccactggtttataggtaagcaaaaataagaatagactatctactgaaaggcaagccttgtcattcagtacagtcgatttacagaatacaaattccaattcaatacaaaggctcacctttgcatgagcaattccaaagcttaaataccatggcaagagggaaacagcagctagcagtggtaacagacataaaaggcggctgactgtcttcagtgctacctttggcagcagtacagatggactttgtaggccactggctatgcttaatttaatatgaagctaaatacagtcaaaacatctggtgcaccactgatggttatcatgataaattaaatctggcatcacacacaaatccattcaatattctgtttatatcccttttacctaaaccacaaaactaaaaatccacatttacttttgtttttcatttcctcttagcagtcctgtattttagaaaaggaacgttttgtagatctgttgtttatacaagttggggggccttctttaagaaaaagaccacgaaaatttgtatacaaaatgtcaagagggccactcaagtgagggtctctttggtttaagcttcatggacaatccacctctggggaggttgaaaggcagtgtaaaaactaaatagtatgccaagtagcacatggaactgggacaaagaatacaaaaatttttaaagcagacaatttaactgacaagctacagaagagcaaacaagactttctaggcaagcaaatcggcaaaaacaaactgtattgtcagaatctgtttttaacatatatttctaaaatgcaaaaccccaaattgggccaggtgcagtggctcacacctataaatccagcactttgggaggccaaggcaagagaatcacttgagcccaggagtttgagaccagcccgggcaatatagtgagactccgtctccacaaaaaataaaaattaaattaaattgaaattttaaaaccccaaatctacagcatactaccacaacaaaagggctattataaaggaaaaaagtcaattaaagaaccaaattatcagtcaagtgtggtggctatagctgtaatcccagcactttgagaggccaatgcagagggattgtttgagcctagaagttcaagaccagcttgggcaacatagcgagaccccatctccactaaacatttttaaaaatttaaaaataaagtaaaaaataatcaaattgtcaattttataataactataggtcaagaaacaagtataattcttacaagcaactaattcacaaaacaattagatcatggctaaccatttgttatttttaaaaagtcagagcaccacttataactaaagtgactactgcctgaactgcaatattcaaattattgcatttttattacattgctttgaaggatattcagtgaagataattattaattctagtgctatataatattagcatcacccacactcttttaaacaaaaaggacctaaaagcctcgactctgcatctgaagggaggagagcatgccatataataaattcagtacaatcaaaatgagaaccatatttctgtttaactttatgcatcttggctcaagagccataaaaaaaaagttattaaaattaatgcatcaaactataattctgtcctttttattactggtaatattctttctaaaatattagtctgctttgctgtactactatatctttttgaaagttttctttgaagatcaggatcactttaactttagaatgaaaacatgcaattatattaatttggcactgaatcttgttagtttcagtgggtttgaaactttgaaaatgatttattcattagaaagccacatgttggccagacatggtggctcacacctgtaatcccagcactttgggaggctgaggtaggtggatcacctgacgtcaggagtttgacaccagcctgaccaacatggtgaaaccctgtctctactaaatacaaaaaattagtcaggcatggtagtgcatgcctgtaatcccagctacttgggaggtgaggcaggagaatcacttgaacccaggaggtggaggtggcattgagccgagattgtgccattgcactccaacctgggcaacaagagcaaaactccatctcaaaaaaaaaaaaaaaaaaaaagcaaaccagttactgcttctgatggcactcataaagatggaagataatgaagctacttgtcattcaacacaaaacacacaaagaaagtgttaacagctggcaaatgtcacaaagtaaacattttcctatttctgttaaataaaattcattcctaataatcactgtcctgtatgaactttccctagcaaattactgccccatttctttcactaaataatcaattttttctaaagttaacacaaaagaaataccctggaaatcctcattctctagtcatgactaaatgaatgaaccacatgggctaccaaaatcaaattctctactgcatcactaatgtaatactaaataggatgctccatcaaaagagacctagaatttacataatttcccataaacttatcagaggaacaaatgtaagacaatgggaagaaaatcaagataagctcactgttgttgctggtttgtgtattcctgtctttctcaactcctcccacagctgatagaacattgtagttaagagagctggtagaaactacttcactaaaattatgtatttgaacatcagccttttttcattctagtcagccttttttcactctaaagtattaaattcaaccaaaaagccaaacattcaaagtctgttcaccaaaaacactcatcataaagatgtttatttactatccatataaggacgcaaaatggtattcctaacagccaatacacagaatcaacctaagtgtccatcaacagatgaatggataaagtcacatacatatgtatacacacacacacacatacatacacacacacacacacacatatatatgcaataggatactatgtgttctaagaaaattctgttacttgcaacaatatggatgaacctggaggatactatgttaagtgaaataagtcagacatagaaagacagatactgtatgatcccacgtatatgcagaatcctaaaacgtcaagttcaatttttttttttttagaaagaatctcgctctgtcacccaggctggagtgcagtggcatgatcccagctcactgcaacctccacctcccaggttcaagcaattctcctgcctgagtctctcgagtagctgggattacaggcctgcgccaccatgcccggcaaattttagtattttttagtagaggtgtttcaccatgttggccaggctggtctcgatctcctgacctcctgatccacccacccagccacccaaagtgctgggaacacacgtgtgagccaccgtgcctggccctcaatctttttttttttttttttttaaagaaacggggtttcactctgttgcccaagctggagtgcagcggcacaatcataactcactgtaacctcaaattcctgggtgcaagcaatcctcctgcctcagcctcctaagtagctgggactacaggtgtgcgccaccacacctagctaactttttatttttattttttgtagtgacgaggtctcgccaagctggtctcgaattcctaggatcaaggggtcctcctgcctcatcaaccttttttttgaagctgaagtagaagcaaagagtagaatggtggttaccaaaggctgagaggaggactggggaaatgtgagtcaaaggacataaaatttcagtgaggaggaataagttcaagagatcagctttataatatagtgactataattaataataatgtattatattactgaaaattgcaaagaagaatttaagtgtcctcaccacaaaaaaaaaaaatgtgaagtaatacatatactcattttagccattccacaatgtatatatatttcaaaccatcatggtatacacaataaatgtgtacaatttttgtcaatttaaaaaatgggattattctctcacctcaacattgaggtactaactaaaaagatatttcccaactactcagatgctgaagccggaggattgcttaagcccaggagttggagaccagcctgggcaacacagtgagactccatcttgaaaaaataaataaaaataaaaagatactgtgattgtcaaagaaaggaaagaggtattaagtcactgaaaggttatatttttcctttagaaaaatgaaaaattcctactttactgtcaactattacctcttctgacacattaactgtagaatccttttatatgagaaaattactaaatcggacactacatctcagaatctgctagaggtcacttggaaaagagcatcatcctttcaaaaggcaaggatgaagaattagaaagaaaaaggccagaagcacacaagtgaaacaagccagtgcacctgaggcctttgttggtccaatcaaactataggtcacaggtatttcaaaaaggggaataaaagacaactgcagttactttagaaaagggttaaattctccaaagtagacgcttcccaaaagaaaaaacagaacgaaaactgcaaaattctttcttctctcctttggagaatacggtttagcacagtttttaaaaaatcaaaatctcaagagatatgggtgccattcccatcccaataactaagtggctctgctaactgcaggttgtgtgaaactgtacacccactacgctcaattgcaaaacagccataaagaacttagaacactacacaagttcaacagacatgaagaaaaacactacaaaattcaaatgtgagggacaattttcctgccaatatacgtataactctaaattcttactctctctatacacacacacacacacacacacacacacacacacacacaatatgtcttgatgatcagagctattacactgtataaatctaattaaggtcagtttcctatatgggaaaaggaagatttatctgagaaataattcaaaataaattctccccaagtaaatagacctaggcctatcattagtttagtttagttttgttttgtttttttgagatggagtttcactcttgttgcccaggctggagtgcagtggcgtaatctcagctcactgcaacctctgcctcccgggttcaagcaattctcctgcctcagcctcctgagtagctgggattacaggtgcccgccaccgcgcccagctaattttttgtattttcagtagagacggggtttcatcatgttggccagactggtcttgaactcctgacctcaggtgatccgcccgcctcggcctcccaaagtgcagggattagaggcgtaagccactgcgcccagcccctaggcctgtaatagttaagacaatcatttatacatcatttatatcaatcaccacagtccacaaaagtcagccttagataagatgccaaaaatcggagatgaattaaaagaaagagtcctgggtcagtagtacagctttgttgcaagtatctgcagggacctggtagaggtgtgagagacacagttccttggtgtgaagggtgagaggtcacagggagggtagcaggaagcccaagaacaggtaactgaatttggacaggcttttgatattttaagcccatttccatggatttttgttgtgttttgaagatagggtctcgctctgtcacccaggatggtttcttaatatatttactataattattcccttggaatactaatattaatactaagttaaattctttgaaaatccagccagtgtcagttatgctaaatgaaaacaaaacactttgtacaattttatatttaaaaagagaagctctacactctaggattagaagcagtggagccagcaagactctcagggcaacattagctaccatttatggagcacttcttatgttccatgtgccaggctaaattattttcatacattatcccactaatgtataaacaaccctatcatttagctattatcagctccattatatagacaaggaaatggaggcacaaagacgttccataactctaacaggattacaggacagagaggtggcagaacaaggattcaaacccaatccttctgttctcaagctcagactcggaaccattatgctttaccgtcttaccaaaatgagaatcaaaatgaaagaacctcaaagagaaataaaaactcaaaggaagaatctgagttctttaaacaacaccagagcaatcctgtcctaaaactggaggattttcaggttttgcaatgtgacaaacttggaaaagatacatctgacactaaatcctttggcaattttattccacctcggggcttcaactaccccattctcagtatctccatcttaaccttgatgacttctcaagatattaaatatttccatctgcctaatgacaaaaatcactcatctcaataaaaagctgtatttattagcatcttcttcctcaaatcagtttgtcctcctgtgttcccaattttttaatggcacaggtgtaatgcaaattacctatgcttcacacctcccccacatgtaagactatatgccttgttctaacagttgccaaatccaactaattctacctctacaacgtctcccatctgtcatacctcttcatttcccctacagttagaaaggttagattctcggccgggcatggtggctcatgcctgtaatcccagcattttgggaggtcgaggcaggcagatcacctaaggtcaggagttcaagaccagcctgaccaacatggagaaactcccccgtctctactaaaaatacaaaaaaatagtcgggcgtggtggtgcatgcctgtaatcccagctactcggaaggctgaggcaggagactcacttaaacccaagaggcggaggttgcagtgagccaagatcacgccattgcactccagactgggcaacaagagtgaaactctgtctcaaaaaaaaggaaaagaaaaaagaaaggttagattctcattactttccacccagtcttcactctcttcctttcatgacatactagaaatagctatcctaaaacacaactctatcatgtcactcctttatcagaacaccttcaaaaaggctccattccccaccaatcaacccttcaagattcagaccaaatgcctccttctccaagcaaccttgtgtaatctccttcccctaaggagaggtcattgcttcctcctctgaacttcagcagtacctcacttgacccttaccaatttcagcctcctatcacaagtacctgtactgacatacaagcatcgtcaccctactggaagacaagcgccttaggagaaggttcaatgtctaattgaactgtgagtctcccacaaattctggtgaaaatatacttgcacacagtaggtacttaaatatttgacaaatgaatgaaaaaattacaaatcagctttctcggttataacacaagcttttcagcacaagaacttgtgcccatttacttaatttttttaaaacatacaaattgtgaagactaatcataatttccatgaaaccagccctttttggttcctagaatacccgagaaaggtgcttattttatttgaagacaaaaaaagtagcatcagttagctaggtcaggcaccatctaactctactattcactgaggccaggaacatttcctagggcctcagctttggtccttctggatgaagcctcagggggactttcctctgataatggactaaacgattcaagatgaccttaatgaccaccctgtttaaaacagcctccttatttctccaatacttcttctccaaacattgatgtttccaccataaggtcagctcctctttttcttccccttatggcaaggcttatggagaaactacaccacataaatgaagactaggagctcaaaattccagaatgacctgggaccatggaaaattagtattttgccttctacagtaaagtcacactcttgagcaaaggaggaaaaaaaaattatcacagtccctcaatcagcaaaaatctaggcatggaagactaaaagaagttagggtccagtaagcttaaaaaagaaaacagtgactcagaaatttcctatctgcaatatatagcaggtttagaggacgaaaatgaaaacagaagattatttctagacagcttgatggagaaagataatatttacctcagtaaagttacaaccataggaacaaatccagattctatttgtttttgtacaactctgcaaaaaatcatagggtgtaattcacttctcagttcagaaataagacgtccttaaaaaaataagtaagaggtacttcttgaaaactaaaagaaaaaaaatctactcccataatcaagagtttccatgcagtattaaaaatgatgtccagctgggcgcagtggctcacacctgtaatcccagcacttcgggagactgaggcgcatggatcatttgaaatcaggagtttgagaccagcctgaccaacataatgaaaccccgtctcaactaaaaacacaaaaaaatcagccagatgtggaggcgcacgcctgtaatcccagccactcaggaggctaaggcaggggaatcacttgaccctgggaggcagaggttgcagtgaggcaagatcgaaccactgcactccaacctgggcgacagagctagactccgtctcaaaaaacaaacaaacaaaaaacaagaccgggcacggtggctcatgcctgtaatcccagcactttgggaggccgaggcaggcggatcacgaggtcaggagatagagaccatcctggccaacatggtgaagccccatctctactaaaagtacaaaaattagccgggtgtggtggcatgcgcacctgtagtcccaactactcgggaggccgaggcaggagaatcacttgaacccagaaagcagaggttgcagtaagccgagatcacgccactgcactccagcctggcaacagatcaagactccgtctaaaaaaaaaaaaaaaaagtccctcctataattcaggaagtgaaggtgctagttgactgttatttattctcactcaaaaagctaactcaaggtcaagaagacctctgccaccagctgcagtgtaccaatcctaggaggctatttctcagaaccccatgcttcttatcaagatggttcccacgctgtcttccctttccctcatcactgcctcctccaggtcaaagaatatccccagggcaagttgcagctgctccttatgcactcagccctggcctcagagtacacatgggttttgcctcatctatgactcttgggggaagcttactatgcagagagcaactgcaatgtgtcgctctctataggatcccagccaggtgccttagtgccatcgggaaaatgagaggaaacaaggaacacacaaaaatcatgaaatactgcttcgggtactaactccaagacagaatttttttcttaagttaaatgtttaaaaacaaaaaaaagctacagtcatctatgtattcagtcatccagtcaatcccatgccaagtataatctctgttaactatgcttagtgtggtcagaaaggaagtctagataaacaatcacaacaacagagtgggctgaatgcaaacagccggggttcaaggaaggctccctgaagaaaattacctgtaaactgaagcaagcaagaggtgaccaggctaagaagaaaagaatgttcaccacacagccattactcagggacgtaattcacccagatttctatttttaaaagatcaaaggctccaaaaaagcaaagggccagtaagcacaagacagaggctcaacctcattagggaaatgcaaatcaaaactgtaagataccacttcacacccatcagaatggctacaatccaaaacccagatagtaagtattagtgctaatgtggaaaaactgcaaggttcatgcattgctagtaaaattgtaacatggtgtagccactttggaaaacagtttgtcagtttctcaaaatgttaaacagaggttccataccccccaaaaatttcactcttaggctttggaagtcaccccaagagaaatgcaaatacacatcctcacagaagtttgtacatgaacgttcacaacagcatttttttaacagccaaaaagtagaaccattcaaagtgtccatcaactagtgaataaataaaatgtggcatagccacacaatggactatgatttggcatttattgggaatgaagtacagatgttatgctaccacatgggtgaaccttgaaaacattatactaagtcaaagcagccagttacaaaagactacatgattcaattaacgtgaaatgtccagaataggcaaatccataaagacagaaagaagattaagggctgcttagggctgggggatgagtagaggaggaaatgaggagtaactgctcatggatacaggatttcttctgggcataattaaatgttctgaaattgcagtgatgattgcacaactctgtgaacacaaaaaacaattgaattgtacaatttaagtaggtaaattatatgatatgtgaattgtatctcaataaagctgttataaaaccaaacaaaaggccggatgcggtggctcatgtctgtaataccagcactttgggaggctgaggtggatggatcacccgaggtcaggagttcaaaaccagccaggtcaacctggtgaaaccccatctctactaaaaatacaaaattatgccaggcgaggtagctcatacctgtaatctcagcactttgggagaccgaggcaggcggatcacaaggtcaggagatcgagaccatcctggccaacatggtgaaaccccgtctctactaaaaatacaaaaattagtaggacatggtggcacgtgcctgcaatcccggctacccgggaggctgaggcaagagaatcgcttgaaccagggagtcggaggttgcagtgagtcaagatcgcaccactgcactccagcctggcgacagagcgagactccgtctcaaaaaaaaaaaaattagccgagtgtgctggtgcatgcctgtaatcctagctacttgggaggctgaggcaggagaatcacttgaacctgggaggcagaggttgcagtgagctgagattgcaacactgcactccagcctgggcaacaatgaaactgcatctcaaaacaacaacaacaaaaagaaaaaacaaacaaaagatcaaaaggactacagcagtgaagaacaaaatttctaattttgttagaaattagaggatttgaacatgccaactggtttggaatctataaagtaattcaagcaagagacagtggccaggtgcagtggctcacgcctataatccccgcacttgggaggccaaggctggcagaccacttgaggtcgggagttcaagaccagcctggccaacatggtgaaaccccatctctactaaaaatcaaaaaattagctggatgtagtggcacgcacctataatcccagctactcaggaggctgacgtgggagaatcacttgaacccaggaggtggaggttgcagtcagccaagagccaagattacaccactgccctccagcctaggcaacacagcaagactccattgcaaaaaaaaaaaaaaaaagaaaagaaaaaaaagagagagagagagacagtggcctgaactagcgtaatggattaggaagagataagagatacaggaaaaagaaacaatacttgattctatatagtggggagaagagaaggaatcaacacagcccagggttacttacttagaaaattgagtagcatttatcaaaacaggaaaacacagaaagacatgtttgggagcaggaaaattcacaatattgtgaaatttaattatatttacaaaagttatataaggacttagagaaggttttaagaaggttttgttttaaggttttgttggaagctttcttgggcatttatctaattttaaaatgcaatttaatgttagttatgtttataagtagaactggatatttaaacagaattcaacttgaattaatcaacatgtatcaaaaactgcattatttttcttttacctttatataaaatgtactgaattaatgaatagactaatatgatttataaactgaactcaaggctcaaggaaaattggactttaaactttttaacaataaattgactattcattttctacaccagaaactgtaagtagttgggtatcactggcatgtagcattactggttgaaaaccgagaagttctaatttgatggcttctattttctctggaaatgaggtcatcaattcaggaaatggaacggaaggatgggtggtatgagaaagtagaccaggaatccaaggtttgatacataattgaaataaaagcaatggaggccaggcacagtggctcatgcctgtaatcccaatactttaggagtctggggcaggacaattgcttgagccagaatttgagaccagcctgggcaacatggtgaaatctcatctctacaaaaagcaagtcaaaattagctgggtgatgtggtgcacatctgtattaatcccagctacttgggaggccaaggcaggaggatcacttgaaccagtaggtggaggctgcagtaaaccaagattgcaccactgcactccaacctgggctgcagagtgaggccttgtctcaaaaaaaaaaaaagagaaagaaaaaaaatgctgcttatcaaaaaggatgggatttctaaataaaaagctttctttattaaaaaaaattaaaaatagcctgtaatcccagcactttgggaggccaaggcaggcggatcacttgaaggtcaggagttcaacaccagcctggccaacatggtgaaacctcatctctactaaaaataaaaacaaaattagccaggcatggtggtgcacgcctgtagtcccagctacttgggaggctgaggcaggagaatcacttgaacctaggaggcggaggttgcagggagcagagatcacaccactgtactccagcctgggtgacagagcgaaactttgtctccaaatataatataataataaaataaaataaaaatgaataaataaaagtgatggagaaaagacgagctacgtggtggacagatacagaaggaccacttgaaatagtcacaggccatttggagtaaaaaggccatgacttcatgaggcatccattagctgaatgatgtctttttctttaaaattacttagtagcataatgactttcttccaaataatgtaaaaagaacgtgtttctggagtcttgattttcagctataccttaaagatagaaataactaagaggaaatttgatgtatgtacttacacaggaatactctgcactctaaatctaaccatggaaaaacattctttccaggaaagttgtataaaccacaatatccatttcagaagataatgaaagtatcattcattcattatactttaatatcatttctatgtcctttttctctaatccttaagtcagaattctagacgagtattgtccaacagaactgttgggaatgatggaaatatactgtatctgtgctggccaacacagcacccactggtcacatgtagccactgaacacttgaaatgcagctagtgtgactgaagaacttaactttaaattttatttaagttaatttaaatagtcatatgagggtagtgcctaccataaagaacagcacagtaaacttttctgttaaagaaaatgaagaaatttacaggccagttaggtgtccaagagtcctgtttacaacacaaaagatgtgaattcactcacttatgaatacatgtaacaacaccgacgcttgtccctgaagagcctttggttctattctcataatacaagagctctaaagtctcaaaaatgtgggtgtggactaggaggacaaaggaaatccatttcacaccccaagttccaagagaaaccgtgtacttagagaaggagttcatcatccttaggggaaaaatgttcatcagacaacttctagaggccagaggtcggcaaacggtggcccacaggccacatctggactgcaacctgtttttacaaataaattttataggaacacagacatactcatttgctgtaaaagcatgtatccatgctttggggctataagggtagaggtgagtagttgtgaccatctggcccacgcagcctaaaatgtttactacctcacatagtaaatcattgatttgagtaaatgttttttacccaatgatttgagtaaaaggagtaaaagactttgttttgaggggtaaactgctgctgtattttattattaggaaaaaagcaatttcaaggaaaaaacaaaaaacaaaaacaatcatatatagaagatttaaaatactgcacttccaatcccaatccacagtattccatcaaaaaatcactgacccaataaatgactgtccaagtacaaagtgataggcagatgcctaattcagaatgacaaccttaagacactgaattccgaaccatttttaaagttgtaaaactccaaaccactataaaggatgtaaaacacatcattttggtttgtttggagacagggtctcaatcgctcacccagggtgaggtgcagtggcacagtcatggctcactccagcttcaacctccaaggctcaagcgatcctcccatgtcagcctcccaagtacctgggactacaggctcatgctatcatgcccagctaactttattattttatttttgtagagatggggtctctgcccaggctggtctcgaactcctggactcaagcgatactcctgcctcagcctcccgaaatgctgggattacagacatgagtcaccacacccaggccacacgatttttttttattttttattttttgagatgaagtctcgctctgttgcccaggctggagtgcagtggcacaatctcagctcaccacaacctccatctcccaggtccaagcaattctcctgcctcagcctcccgagtagctgggattccgggcgcacaccactgcacctggctaattctttgtgtttttagttgagatggggtttcaccatgttggccagattggtcttgaactcccgacctcaggtaatccacccgcttcagcctcccaaagtgctgagataacaggcgtgagccaccgcgcccggccaacaccattaatttttaagtacactaatatattggaaattttctaaaacaaagcttgaaacaactatcaccaaaagttctgtaacacaaagagtcaataccactgaacacagtgttttcacctgtaacggagtaaacattctcatttcagaatattattgaaatagttaaggtattatcatgaggtacagtacctgacacagaatgggtacttatttaaaaaaaaatttttttttaaaaggatgactgtaaggggtcattccccatggattatggataattagggccttaccttctcaataatgcaaaactacattttcaatattgtagcatcactgaatgttttgtccaaaactagatttagagaaaatgtcacctactgattgagagcacagtctcgagaagcagactgcctcagtctacttatagccctactacgtactagctctgtcctcagtttcctcatctgcgaaataactatacttaacaatccatgaagaacaagggaagggtacagtgacgtagaacaacactgtggcaaactgtaagcactcaacaaaatgctgtattttaaaaacctatggctaatgtactgcccaaaattggtacaatcttttttagagggtaacttggcaatttctactaaaatctaaaatatgcctaacttttgaatcagtaactctatttttaggaattcatcctgtaaaaatattcacaggtttatgaaaagatattgacaaggatgttaactgcagcatcgttcataatagcaaataaccggaggcagtctaaacatctatcagttgaaaacaggccaaattataacactaacatgttttcttatggaatacctgtaattattaaaaaataaactatgtgtgcacctatttggggaaatgttcatgatttgtggttaagattaaaaagtgggtctcagtacagtatgtagaataaaatcttatttctattaattaaaaaaagacagaaaataactacagcagtcagaatccactaaggagatgcaacaacccacctgctggggggggaaaatgtaatgaaaaagaaaatgcatatagcataaatgttttttagagaaaaaacatggaactcctctaacagctatcattttggagattagaactattagaaactgggccgggcgtggtggctcacacctaatctcagaattttgggaggccgaggcgggtggatcacttgaggtcaggagttcgagtccagcctggccaacatgacaaaaccccatctctactaaaaatacaaaaaaattagccagacgtgatggcgcacacctgaggtcccagatactccggaggctgaggcaggagaatcgcttgaacccaggaggcagaggttgcagtgagctgagattgcgccactacactccagcctgggtgacagagagaaacttgtttcaaaaaaaaaaaaaaaactattaggaacttctatttgctaaatatttttttgcattatgtaaagtttataattagcatatactaattttacaatcagaaaaaagatgggccgggcatggtggctcacgcctgtaatcccagcactgtgggaggccaaggcaggcagatcacgaggtcaggagatagaggccatcctggctaacaaggtgaagccccgtctctactaaaaatacaaaaaattagccaggcgcggtggcgggtgcctgtagtcccagctactcgggaggcagaggcaggagaatggcatgaacccgggaggcggagcttgcagtgaccggagatcacgccactgcactccagcctgggtgacagagtgagactctgtctcaaaaaaaaaaaaaaaaaaaagaaagaaaaaagaaagataaaataggtttttagagacttgtgagaactctgctgcaaacgctgtttaggaaaacatataaaattttgtatgtatgtactgtcacatgtacatgtacatatgtaatatctatatacccaattttgtaaaataatcccaattttgtaatacatataactagaaaaagagactggaagaaaagacaccaaaatacagacagctgttatctctataaactccatgaaggcaggagcttcaactgttttatattgaaatatatactcaattacaaacatatgcttattttttttaattacgagatataacctgtcactacactggactgaaacttactgctacttgagatatttgttcctgatatataaattctgttttactttatcctcttgaagcatcattctaagtaaaatcttacaaagtaaacttacaaatccagcaaggaaaaaaaattagattacatactgtaccttgctctgataagaactttacaatggctttgaggaactcaacaaggaaaatcagtgtttccaagaagaagaaattcggcaggacttggtggttcacacctgtaatcccagcactttgaaaggccacggcaggtggatcacctgagatcaggagttcaagactagcctagccaacatggtgaaaccccatctcaactaaaaatacaaaataattagttgggcatggtggcgggcacctgtagtcccagcagctactcaggaggctgaggcagaagaatcacttgaacccggaaggtagaggttgcagtaagctgagattggccactgcactccagcctgggcaacagagcaagactcggtctcaaaaaaagaaaagaaaaagaaatttatgggctgggcacagtggctcatgcctgtaatcccagcactttggaaggctgaggcaggtggatcacttgaggccaggagttcaaggccagcctggccaacatagtgaaaccccatctactaaaagtacaaaaattagccaggcttggtggcacatgcatgtaatcccagctacttgggaagctgaggcgcaagaatcgcttgaacccaggaggtgaaggttgcagtgaacagagatcatgccattgtattccagcctgggcaactaagaaatttacttctttaaaaaataaaaataaaaaaataagtgaatatctggtctgtacctttaatacaatatcaactaaacttaaaagaaaaagaattttgttgattgaattaccaaagaaagtttttgagaattttaaggtccaaaaatgttactattatttgtcatcttaacttaaagatctaaaagtcaaaacatctgtctaaatagagatgttcaagaaatatttcatgctttgaaatgctatagcaataatatgaaattatattaaatcataaccagatgatatgtcttcataacaactctcaaccaaagaaagcagatgctgaaagaaggttgctggccgggtacggtggctcacacctgaaatcccagtgctttgggaggccaaggtgcgccaatcacttgagctctgaagttcaagaccagcctgcacaacatggcaaaaccccatgtaaaaaaatacaaaaattagctgggcacggtagctcacgcctgtaatcccagcactttgggaggccagggtgggcgaatcacaaggtgaggagttcgagaccagcctgaccaacacggtgaaaccctgtctctactaaaaacacaaaaattagccgggcgtggtggtgcgcatctataataccagctacttgggaggctgaggcaggagaatcgcttgaacctgggaggcagagactgcagggagctgagatcgcgccactgcactccagcctgggcgacagagcgagactccatctcagaaaaaagttacatctaaagtaagttacaatgctgtacatacatttgacatcaatgacagtcaaagacaatgagaaggggaaatgtcacaaaagaactgccatagaattttaacagaatgatctctaatgatctttcccactcatttactcaagtctttgacatcagctcatagccttccttctcaacaggatcctatcataatccagggtgatggcaacaaaaatgtactcatctaaccaggtaccttgttcctaggtgtcctctctccacgaatccacacacgcagccaaacttgctctacctctaaagccattcattcgaggcatcccattctctagccataatcactagcaatcctgaatattcgagatgcatttgttctccagcctcaactgtacctgtctttctttggtcctcagttttcttcatttcagcatctttcagatttcacttctactttctctggtttatactcactgcttgtaggaatttaatattatctccttcattttggcaaactatttttttttttttttttttttttgctacagagtttcgctcttgttgcccaggctggagtgcaatggcgcgatctcggctcaccccaacctccgcctcctgggttcaagcgattctcctgcctcagcctccctagtagctgggattacaggcatgtgccaccacgcccggctaattttgtatttttagtagaggcagggtttctccatgttgtgtcaggctggtcttgaactcccaacctcagctgatcgacccgcctcggcctcccaaactgctgggactacaggcatgagtcaccacacccggccatcattttggcaaactattaaaacctataagaaatctaacttatttcaatgacctaaaagaatcaaacaagaattaatagtctattatacagaataaaaccatgtttatctaatcttctcaaggacataaacataacaaacatgaacgtgctcattcattggtgggtattttaactcctcaatagtccaaccctcatctgcttttccttaaaattatttcattattccagctgaggagaattaaatcatgtgaaaagccccatatcagcctttcatagtagcatttcttctttctttcttttttttttttttttttttttttttttttgaaacagtctcactctgtcaccaggctggagtgcagtggtgcgatctcaactcactgcaacctccacttcccgggttcaagcgattctcctgcctcagcctcccaagtagctgggattacaggcgcacgccaccacgcccggctaatttttgtatttttagtagagacggggtttcaccatgttggccaggatggtctcgatctcttgaccttgtgatccacctgcctcagcctcccaaagtgctgggattacaggcatgagtcaccacacccagccacatttcttctttcttcataaattttttctgggccgggaacagtggctcacacctataatcccaacactttgggaggccgaagcaggaagacttcttgaagctaggcattcaagaccagcctgggcaagaaagtaagaccctgaccctgtctcagcaaaaaataaaaaaataaaaattagccagatgtggtggcacgcacctgtagtcccagctactcaggaggctgaaatgagaggatctcttgggcccagaaggtagaggctgcagtgagctacaatcacaccactgcactgcagcctgggcaacacagtaagatcttgcctttaaaaactaaacaaataaatcaacttttttaaaaaacaattttttcccttaacggtattttctagcacctaatattaaatacacatggtggttatttcatgttttctaggaaacaagtaactaacataaaaacaaaaaataaataaaatacacatggtgtgtgtttgataaacaatggaatattttacctctttcatcacttaagctttgcatatattaactcatttaactcttttaacaattttatgaggtaggtattactactatctccattttgtatcgaggaagctgaggcccagggaggttaagtaacttcctcattaatataaagcctctatgcagtagagctcagatttaaacccaggcggtcttggattctgcatctgtgctcttagcaatcatgccacactgcctctcaaacccaggctaaacttttgcttaactgagaaatctttccactgaaaacatggttaataattagtttcattatattcaagtaaacaccaaattagtacatcgcttccataccaattgtaataatctctaaattcttcatctgtttatcattcataacacagtaatcattcttcctattttcacaaaccatttcttatataaatttcctaaactttacatttcctttcactttaaatagctcagtaactttctaattttttcatccacctgaagttaccgggttactttcttcactgtctcattcttttcttttttaagacaggggctccctctgtagcccaggctggagtatggtggtgtgatactggctcgttgcaacctctgcttcccaggttcaagcgactctagtgcctcagccttccaagtagctgggactacaggtgcacgccatcatgacccactaattgttgtattttgagtagagacaggctttcgccatgttggccaggctggtcttgaactcctggcttcatgtgatctgcccggcttggcctcccaaagtgcaggactacaggtatgagccacggcacctagccccaaaatattgtttcattctattaagcatgtaatatacaacttaccaaattttgtaactaagttttcctctttccttcttctaaaaaccatcaatgtttcaacttccccttaaattcttttttattttattatcttttttttgaggcagggtgtcactgtcacccaggctggagtgcagtggcaccatcacggctcactgcagcctcgacctccccgggatcaggtgatcctcccacctcagcctccggaatagctgagagtgtaggcatgcgccaccatggccaactaatttttttttttttggtaatttttgtataggtggggtttcaccatattgcccaggctggtctcgaactcctgggctcaagctatccgcctgtctccacctcccaaagtgccaaaatgcaaggattacaggcatgagccaccacaccagacctaaatactttcttttgctgaatgttaaaacagtatcaaagtcaaaaattagaaccacttattctgagtgaagccaataagcacttcacctttgaaggagctctaagtagaacacgaaagaaagttatcaatattttatctgctaacatttacacggcaacctacttaaaaagttatatgggtgcttccacttctggaaagcattgtcttatctaagaagtccagattttctctttgcccttctagaaaacacatactatcaagtgtcatcaaatatttttcttatgttttataccaattaaaatttaataatggaggtgactgtgaagggagaaagaacaaagagaatacccaagcctaggtttaatttttataactttttgaagaaaaatatcaagaaaataggaaaacagaagagaatgaacattatattttctacatgaaattaaaagaagacagtagtttgagacaggtcactctgaaaacaaagtgtcatactttttttttttttttttttgagatgcagtctcgctctgttgcccaggctggagtgcagtggcacaatctcggctcactacaagttccacctcctgggttcacaccattctcctgcctcagcctcctgagtagctgggactacaggtgcccgccaccacacccggctactttttgtatttttttagtagagacgtggtttcaccgcattagccaggatggtctcgatctcctgacctcgtgatccacctgcctcggcctcccaaagtgctgggattacaggcatgagccaccgtgcccggccccaaagtgtcatacttttaataaaagtatatggtataaaaataaaagtatatggttaaaaaaaaaaaaaaacttcaactacccagacctcaatttgaaggccaaatgttgtattactaatagtgataccctgcacaaattaattctctgaatctccatttcctcatctggaaattagtaataccatctaccctgaagaatgggttattagaagtaataagaatacagcagctcaatcattccttttctccaaccatttcttacagtcaccacactaagcaaacagcaagaactgactcacctcaagccattacataaaatttatctattagacagtgagttaaagtatcaaataattctcattgtgatgaccccacatagactgttgtcttaaagtctttctgctgtattcagctctaagaagatgtttcttgatgcgcagttaaatttacaataaattacctgaaaattttctcaggcatgccaaaaatcacaagatctatttatatattttagcaatctagtgaaaacgttctttacttatcaagaactgatgatacttaaacttccttccagaggtctctactcagtttaatttgtgatagcacttgtatgtgagacagcaaacactatacattttaagcaaagaaaaatactatagaagacttcattttttacagagtttaaaggaaagctcattctgatgttcagaaatacagtggctcgggagtggtggctcataactgtaattccagctcttcgggaagccgaggcagaaggatcacttgagcccaggagttcaagaccagcctgggcaacatggcaaaaccccatctctgcaaaaatacaaaagctactcagttgtggtggcatgtgcctgtagtcccagctactcgggaggctgaggagggaggatcacttgagtccacgaggtggacattgcagtgagtcaagatcatgccactgtgaccttgtctcccaaaaaaaaaaaagaaaaagaaaatacagttactaaacagttttgtttttgttttgagacagtcttcctctgtcacccaggctagattgcagtggtacagtcttggctcactgcaacctccatctcttgggttcaagcaattctcctgactcagctcccaagtggctgggattacaggcatgtaccaccatgcctggctaatttttgtatttttagtagagacggggttttgccatgttggccaggctggtctcgaactcctgacctcaagtaatctgcctgcctcagcctcccaaaatgctgggattacaggcatgagccaccacgcccactccagttactaaacagttttatgtgtaacatcacttagactctatcctaaggaaataattgtaaatatgagatgacatttatctgctagaatataagttccatccgggcgcagtggctcacacctgtaatcccagcagtttgggaggccgaggtgggcagatcacgaggtcaggagttcgagaccagcctggccaacatggtgaaaccccattctctactaaaaatacaaaaattaggctgggcacggtggctcacacctgtaatcccagcactttgggaggcaaggtgggtggatcacctgaggtccaggaggtcgagaccagccttaacaacaaggtgaaaccccatttctactaaaaatacaaaaattagccgggcatggtggcaggtgcctgtagtcctagctactcgggaggctgagacaggagaattgcttgaacctgggaggcggaggttgcaatgagccgagatcacgccactgcactccagtccgggcgacaaagcaagactgtctccaaaaaaaaaagaaagaatgtaagctccatgagagcagagatttttttctatttattcattatcatatcctcagtgcctagaacaatgacaatcacttatttactgaatggaaataaaaagatccatagtgttacagcagtaaaaaacagaaaacacttatgatacattatgcattcattacaatgatgatgaaaatttatgattacataaaagtgcttacactcatttatttaaaaaacattaacttagtggccgggagcagcttatgcctgtaatcccagcgctttgggaggtcgaggcgggcagatcacttgaggccaggagttcaagaccagcacggccaacttggtgaaaccccatctccacaaaaaaatacaaaaattagtcaggcatggtgttgtgcacctgtaatcccagctactcaggtggcaagattctgtctcaaaaaaaatgactaagtcactaacttaggcattaagaagactgggttctaatgccaactctgtcactaatttgacctgtaccttggggtaaaggacaacctatttgggctccagcaccctcgtatgtattatttcctccccatttcctggccttggctggtcttaatgagactggctttgggtagacattacagcgagtacatgcctgagttacctcagaaagcaaagactaacacaaacagcagagaaaaaggggatgcaacctggagcagatcaaatgctgcatcccagtggactaggagatcctcagtgacatgctcttcaagccacactgactcagaatcatccatttttaactctaggacctcaaagcatccttgaaccactttacaataaacagcaagtaatttaggtcatctgagtcaagagaacaatgccatccagggtataccaaaatatcaagccctactgtcaaaaggaccagaaaataaagtacaggtggagaggaagtgatttcacccgctggaaatagaaaaagtagatctgtgtgtcagccaacaactatcacacaatggaacaggatgcttacctctctgctggaggaaaagaagctattctcaagtccttagaataaaaactattgtaatcttactatatctattttatgtcatctgagagcaatccatgaggacaatgcttcctctttcagagaatcttccaactgaaaatctcaaagaattcccaagcaccacttgcccttcaacacctacctacacctcacttctctgccccacactcacaaactttattagcatccacaattaaagaaccatgaggccaggcgcggtagctcatgtctgtaatcgcagcactctgggaggccaaggtagaagaatcacttgagcccagagggttgagaccagcctgggcaacatagggagaccttgtctgtacaaaaaaaaaaaattctcggccaggcacggtggctcacacatgcaatcccagcactttcagagcccaaggcaggcggatcacaagctcaagagatcaagaccattctggccaacatggtgaaaccccgtctctactaaaaatacaaaaattagctgggcatggtggcacacacctgttgtcccagctactcaggaggctgaggtaggaaaatcacttgaaccctggagatggaggttgcagtgagccaagatcatgccgctgtactccagagcctggtgacagagcaagactccgtctcaaaaaaaaaaaaacaacttttttttaaattagctgggtgtggtggcacacgcctgtgtcccagaggctgtggtaggagggttgcttaagcctgggaagtcaaggctgcagtgagctatgactgtcccactgcattccagcctgggcaacagggtgagaccctgtcttaaaacaaataaataaaaaacaaaataaaataaaactctgctctgccacttcctagctgagttactttgggaaagttattgaatctctccgtgcctccattttctcacaattataaaacggggataatacctgttacacaggattgtgataaagattaaattcatctagaatgcctgggtaaatacttagcataaaatagatttccaaaaatgtaaggccaatttctaccgaggcctattccttacaaagaaaactgaagacacataggaattctcattccttgtagtgatctaaattaccaaaccatgcaacatcttaatataaaagaaatctcaaggaaggaaatgaagttactgcctcatggttttactgacaagcagtttttaaattgcaggttcacagagggatttgggggacccattaatcccctgaaattatacctgattttgaggcagcgtgctacttctgtaaatgtcttcactgaatttccactagctccaaacctatttctctattctcctttacagcaaatatcctcaaaaaggtgctatactcactctctcaaattctcctttcattctctcttaaacccactccaataagaatgatgaaacaaaccctgccctgaaactaatcttgccaagatcatctgtccacattgctaaatccaatgatcagttctcagtcctaagctgatttttagcagatttttgacacacttcatctacccctcctgcttgaatacgtttttctcatctggcttccaggatgccatataatatagtctatgatttcttggttttcctccttttttgctgatctcttatcagcttttgttgctgactgttgtctcagactttttaacgtccctggacttcgtccttgaactttttctcttctcttccctatactccactggtaatctcttctggtttcccagctttacttacacttgccacacactcacaactaggtatctccaacccaggtttctcacatgaattccagactcttacaccatcttaaaactgtctacttggcatctccacttgagtatctaatactactttaaccttggtgtgtccaaagtaagctcaagaggccaggcgcggtggctcacacctgtaatcccagcactttgggaggccgaggtgggcagatcacttgaggtcaggaattcgagaccagcctggccaaaatggtgaaatcctgtctctactaaaaacacaaaaattagctggatgtggtagcaggcacctgtagtctcagctactcaggaggccgaggcaggagaatcacttgaacccgggaggtggagggtgaagtgagccaagactgcgccactacactccagcctgggagacacagtgagactccatcttaaaaaacaaacaaataatctgctctaaacacagccttcccatgtcagctcctgacaaccccatcctttgagctgcacagtcccaaaccttggaatcatccttgactcctttctttcaacccctaccctacagtgaaattcatcagagaccaggcatggtggttcatgcctataattccaacacttggggagggcgagacaagaggatcatgtgagcccaggagttcaagaccagcctgggcaacatagtgagaccccatttctacagaaagtttttaaaattagctgagcatggtggcacatgcctatattcccatctacttgggaggctgaggtagaaggatcacctgagccagggaggtcaaggctgcagtgagccgtgttcacaccactgcactgcagcctgggcaacagagtgagattctgactaaaaaaatttaaaaactcatcagaaaatactgtcgctctatcttcaaaatacatccagaagtcatatacttttcacaagtctactagcaaatggatgaagcaccaccatttctcacatgaattattatcatgatagcctcccacctatctcattatttctagcctgttgtcccagtctgctgtccacaaaggagtcttctgtccttttaaaatgcaaataatgcactatgggaggccgaagtgggaggactgtttgaactcaggagtttgagaccagcatgggcaacctaaggagagctgtctctactaaacagaaattaaattttttaaaaaaagaagagaaaatgcaaatcacatcatgtcacttctttgctcaaaaccatccagtgccttccccatttcaatttaagccaaagtcctgaaaaggccccaagaagcacctttacattcccccagccccttaccggtgaacatctacctcagaagtcacaacagacatcgtagactgaatgggtggtccccagaaagatatgtccaagtcctaatccccagttcctggggactgccaccaaagattgccagcagccaccagaagcaaggaggaagtatggaatgggctgtccctaagagcccccagaaggaactaaccctgccaaccgacaccttgatttcagacttctggcctccacaactgtggcacaataaatgtctgttgtgttaagccaccaagcatgtgcttgtaatggcagccccaggaaactgacacaccactctaccccctgctcattctgctcccaccacgctgtcttccttgtgcccacttcaggacctttccactgactattctcctctgtctgggaagctcacgctgcagaacttcacatggcaaactcccacacattttagccttttgctcaaacatcatcctctccatgaggcctatcctgactcccctatttaaattgcaaccaccaccatctttccacttctttcaaactcccttacagtatctatttttttccacagcatttatcatactctaatatactacataacattcttgtttattacccattggattccatagaatataagctccacagaggcagggtttttaggtttgcttggggttttttttctcttttgttcactggtgtattctaaacatctataaactatgcctggcagatagtagctgttcaataaacacacgctgaataaatctgttgaacgaacgtgtatatgtatatgtctttttctggaaacagaattcacagtttttatcagattaatgaagtgatctgctacccaaaaaaggtttccaaatctttgttctcaagctttaagtggttaaggaaaagggaattctatcctaaaagaccccaactctaaaaaaagcaaacaaaaccccaaaaacactcatactatgacttcgtatcttacaaatggcagacacaagtttaaatttcatactcccaaaaccaaattttgctaaagaaaaaaagacagtccactacaatttaatggcttgagaagcaccttcacccacttttcacagaaccttgcacactaaaaggtgtacccaggatgagcttatgtctctactgcttaagcaacaaagggtggccagcagtgtgaagcattcacataagcaaatcaaagttccacacagctcaagaacatgatccaatgctccacctaggtaaaatcctatccaaagtaggggagtagaaccaaagcaaatcataacctgtctagcatctatccttactatggaataaacagatatttactcaaaatacaacactgttttaaagaccttgagaaaccatagaagagatgtcatttacatgccccctcagtatgaaccataaagcgtaacaatgaaaggcagtcaagcataggaaaacctgttaatggattttgataacagcagaaaggcacccactacattccttattattgctgcaacatatttcaaagttactactaaacaggtctaggctaatacaatcacaccaaacaccagaattcagcatattacttatccaagcatacattcttcagacatatcttttatattaaatcaatgaccattacagaggaaaatatgcacatctgctgttccatctttcttgttccatcagcaagtggattcacaatgcaaccaagtcctagtccttacctttcctggttccattctccaacagaggaatttcaaggatacagaatctatgacatactttgaagacaaaggcattttaaactctaattaactcataatttgccttgagctgcttttttttgagacgaagtctcactcttgtccccaggctggagtgtgatggcgcagtcttggctcactgcaacctccgcctcccgggttcaagcaattctcctgcctcagcctcctgagtagctgagattacaggtgccaaccaccacgcccagctaatttttgtatttttagtagcaatggggtttcaccatgttagccaagctggtctcgaattcctgacctcaagtgatctgcccacctcggcctcccaaagtgctgggattacaggtatgagccatcgcgctcggcctgccttgagctgtttttttaaatactggtaagactttcacatctcagaacacatcattttatcaaattccaaacccaaccgctcttcatcacctccacgactaccacactaacccaggcccacagcacatcccctgcagagtctggccacactcctcatcagtctgcctgcttccactctgactggcagcagtctaactttcttttttttcaacttgagagcagctactgtttatttaaactgatcagactagaaaaataattgtggtaaacacctcggttcattcttctaagaagcctgtggatctggtcctccctgttgccagcatctccaccttctacaaaatgggtggtttttcttcattctatcttgtggagaaaataatttgaagggccacaggaagttatttgcttctttaaagcgttttccaacagtatagatgtcatgaatcagatcctccatgcagatgatgccatatttaccaagagatagagcaatcaaagcgttatctgtcaaagcaatttgtttattcatcttgccataaccacgcttgtagattagttcatttactgacttcagatttgggttcccccatgtaatatatggctctacaatcctcagcatgttaactgaagccttgttgagcttcacaaaggttccactgaagatttgataaaggcgaagaagctgcaacacctttcagacctctgggctcacaccattggcacctctggtcctgatgacaaaggccaatttgggttctgcaggtacacagaagttgccagcttttcttgccatccttgccattcgaatttcagttctgtacatctgcctatattccttgtgatagcactatgctttttcataaataagctccctccttgcctttcaaagcatgttttgggcaaacttctttctcaggagcttgatcttcagctctgtgaaattcctttgctttttcttaagggtttctggcacaacaggaaccttcttcttctcttcaacaccctccatggttccagctggtaaagatcgcagtctaactttcacacagcagccaaagtgatctttataagacagagatcagattctgtcacacacacctgatgaaaaccttccagtggcattatacttggaatgaaagccagaggtcttagcatggtccacagggaactttatggcctggctcctgcccctctttcctggtatcacctcctactgttctcccagagtttttccactgttccttgaccaaaccagcaggcttccacctcgggatttttgcacctgatgttccctctgcctggaaggctctattcctatacctccgcatggctccctagcctgttcaaggccttgtccaaatgtcacctcttcagagaagccatccctaaataacctacttaaaatggtaccatccgtacaccctgtcagtgtctctctctttgtctgagtatcatggttgcctcattttataatttgtttaatctgagtcagaactgaagcatttatttccctataaaatgaaatctgggcagaacaaatgctattttatagaccactcattttgaagttaaacacaatatataaacaaacatacacacctttaaaaaaaacagtgctttggccaggcacagtggctcacacctgtaatcccagcactttgggggaggccaaggcaggcggatcacctgaggtcaggagttccagaccaccctggccaacatggtgaaacctcgtctctactaaaattacaaaaattagccaggcgtcgtggtgggtgcctgtaatcccagctacttgggaggctgaggcaggagaatggcttgaatactggtagcagaggttgcagtgagccgagatcatgaccctgcacttcagccagggcaacagaggaagactctgcctcaaaaaaaaaaaaaaaaaaatgtgctttggtgtatggttttcctttatcgttcttaatttaaaagtattaccagcctgggcaacatggcaaaaccccatctctacaaaaaatacaaaaattagccaggcatagtggcgcacacctgtagtcccagctacttcggaagctggggtgggaggacggcttgagcccgggaggtcaaggctgcagttagccatgatggtgccactgcactccagcctgggtgacagagtaagaccctgtctcaaaaaaataaaagcattaaaaagaagtgctgtatgtacaagaagtttatggttgtagtactagatagagtacaaaaaagaaaaatggaaataagccaagtgcccaataataggaaaatacttaaggaatatacatgtgaaaaaaacataatacaaccatgttatgttaatgtgttataataacatcataacgttataataatatagtaatttttaatatatgttaataatgactacatagaagcacaaaggtgtttatcaaggagtttttttttttttttttttgagacggagtcttcctcttgttgcccaggctggagcgcagtggcgcgatctcggctcactgcaaccacctcctcccaagttcaagcgattctcctgccttagcctcctcagcagctgggattacagatgtgtgccaccacacccagctaatttctgtatttttagtagagatgggatttcaccatgttggccaggctggtctcgaactcctgacctcattatctacctgcctcggcctcccaaagtgctgggattacaggcgtgagccactgcgcccagccagtgtttttttttttttttaagaagctgtaatgatagtaacaaagaagtccaacctttatattgcacaaatatttactaaccatgtagcatctatgtgcctgaccagccctgacagatgaggattcaggagcaaacaagactcgtccctgtgctttcagagcacacagggtagcaaagccactgacaagtacaggtgggattacagtgaggcataagagatggctcgggggagtacaggggccaggcagagcaccctgggcacagccctgaggctttccaaatgaaatgatcccaaaactcagacctgaagaataaacaggagctaagaagcaaaggagggggagataaacaggtatgaatcagtgggtgctcagggtgagaggcaagagaagacatgaaacagaatatgtgaactattattttttaaaaaactaaagtaacttctatatttgatggtagaatttttggtaaaatttatcttgtataaaatatgatactaggctgggcacagtggctcacacctgtaatcccagcatttggggaagccgatgggggagggttgcttgatcccaggagttcgaaaccagcctgggcaacacagcaagacctcctctctaccaaaaaaaaaaaaaaaaaaaatatatatatatatatatatatatgagagatactaaatgaaagccaaatactttaccaaccactctggcttctcaaagcttatctgtcctgtggctactacctctctttccttcagcctaacctactatctgaccaaacacgagcagtggcaggaagcaattttaacacgtcacacagatgcacacataactctttatcaggactgaccaatacacttcccatccccacattacaaatttggggccaaaattactcagacagagatgtactctccagtctctggctgacgtgctaccttattacctcgccccaattcccttcaggtgccaacagacactccgtgcctagcattccaagcctgtcttctttggtctacctaacttatctggcactattcctccccacaaattctgtacttcaaccaggttctctttactgaacgctgcgcataccatatgcattcctgcctcaggccgacccctgcctggactgtcctaacctgctctcccagtctgctattcaaacagcacccattcttcgatggcccactcagcttttcaatggatctttggtcaacttatttaatccacaccaatctctaacctgaaactgaactaaatttgttatgctaaacagtaagtacttggttaaattccgcttttgttctagaaatctctaaatgttgtattcttgcaaggcttccctcctaaattctgaggccaaagatagtaacttttatttcttttgtatcccactaacagcaacattaaacttggaaaacacacctcccacacctgttggctagctgacagatcctggatggaaagatgagccagagagcattcagtgccagttgcttttctctggaactgcgggttcaagcaccaagattaggactagacttatgtgctcctttgggacaggaaatggcatatgtactgaaacgcgagatagttaaaggacacccccccaaaaaaaattaaacatgaggaaaaacatgtgttcctaatgtgggcaaaccccaccatattacaagtctccccagtaccttctatactatgtagctaataatacaaataaataataaatctaatctatttgataaatgaatagatttaataccactaagagaaatatgaaggtaataggtataaccaacagcctagagtttaataaagctccaaggtaatccctgtatcaatttataagatgctaatgaattatttttacagtttttcaaatccttcatatagaaataaactaagccattttctaggaagaaaaaaggtcaggctttacttacagagtcttgctcttgttatccaggctgcagtgtagtagcacgatctcagatcactgcaatctccacctcccaggttcaagcaattctcgtacctcggcctcccgagtagctgggattataggcatgcgccaccatgcccaaataatttttttgtatttttagtagagatgggttttggccatgttggccaggctggtctcaaattactgacctcaagtgatccacccacctcagcctcccaaaatgctgggattacaggcatgagccaccgcacccggcccaggctttacttctttagggagacagggtggtaggggtttcataatgaactgaaaaaccaaacactgtgtccctttcatttggcaagaactccttttccaaagaagggactcagaaaaaatgaaattacttatataacgtctgagaaatattcttaaaagacaacaaaacatacagaaaggtattttggattcaggagaatacaacctcttccaaaaagagatttactctctactccctaggaactactaatgacatggaaaatcccactcaagttacatgaggtcacacacccacaataaaggtagctgcctgaaggtggtctgccaagataaacaccaacttgttaactccctaagtgctatgcaaatgcccaagatagtatatgcacacttaatgactctctacattgttggagcatcatgtttctactattactacagttctttcagtctgtattttagtggggtttttttcatatctgttccccacttttcatcatgacctccaggagggtagggacacatcttactcatctttatatccccaatgcctagcattatatcttgcaagagacactaaaaaaataaaattctgccaaatgaatgggcaagcccaaaatatcactcagataatcccttattaacagccaaatgcccaggggaagggagacttagatgacagcaccttcctagaaaatatggcctgaaattacagatcatttctacaacaagttacatttcacttactaagcaactggtctatcttttcagaataaattttacttttcatgatcagtgtaagtatacgggaagcatgattattctgaaatctcttcttttcaaactaaacacatagctcctggacacccacaggaatcatacgagaagagggagaggcagtagacattagtttcaaacctataactctttaagagtcaaacaaaagtagaaaatactaagaaaagaaaacttgtcagaaaccatttaaagacaaaggacaccatcatctcccagaatttatcatcaacagaacaggtgaagcttaacaaagataaattaggccgggcatgatagttcacacctgtaatcctaatactttggaaggccaaggtgggaggatcgcttgagcccaggaggtcaaggctgcagtgaactataattgcaccactccagcctgggcaacaaagcaagaccctgtctcaaaagaaggaaaaaaaaaaagaaaacaaaacaaaaagacaaagtataagagcgccttcttcacttaatgaagcccaagttataaattcttataacccattaagtttataattgaaagagtatcaagcatatagctttatctatgcacataaaaacaaacataagttcagtaattcataccagaaaccaggtaatcacaagtccaacagtttaccttatctttgaaatacactatgtagttggctaatttcacagtaatcaattcttacgggatcctcttataatagccactcaaggagaaaatttcaaatactgacctctaattcaatgtaatacaaataagaggtcttccatccagaattatatcaaatggccacaattcctttctcagtaacaccataaacaggctgaagctctccacaaatcttctctgtaagtggatcccacggtggttgtgacccggtgctgagcgcacatacagttactcctagacaatcacctcctaaaagaagacagatgactatcactgtgactaaatgaaacaacttcaaaaatgcagctctgccaactagtttcattagcattttccaaacaaaacaggtgtcacagacaagctcaaaatagtcaaactcctctctctttggtgctttagcaacattcaattccctaacacctcccccagatgctggattctttttaacagtgtcttacatcgggtatgtttctcaatattaggaaggtttaaagaagctgtgaggatcggatagcggaacataaagaagcaggaaggccgggtgcagtggctcacgcttgtaatcccagcactttgggaggccgaggtgggcggatcacttgaggtcaggagttcgagaccagcctggccaacacggtgaaaccccgtttctactacaaatacaaaaattagctgggcatggtggcgggcgcctgtaatctcagctactttggaggccgaggcaggagaattgctagaacccaggaggcagaggttgcagtgagctgagatcgcgccactgcactccagcctgggagacagaatgagactccatctccaaaaaaaaaaaaaaaaaaaagaaagaaagaaagaaagaaggctctattttgatactgggagcctaaactgaatgattctggagaaattcacagatggggctgaggctcaccttcatgacagctgtatcaaaggcctaaatttctaaggctcagaaatcactacaataagcctatcaacagcatgtgatactctccaagcattttgcaaccttaacatttccatcctttacagtactttgatatcctcaaaagatgtcttggatttcaaagccagtcccacaacaacaaggctggcaatcagcatcccagaaaactgcaaagaggttaagacccaagcaaaatggacttggggatgcaaggaatttgtcagcacctgtattctcctaagaagtggtaaaaatatggccgcttcctacaggaagaaactatgccaaataaccaaaccaaaagtgagaaaacctaaattatattaacttctcatgagaagaggcacttaaccagataactctgagtcaggaccgttcagagggcggaaagaaaggacccatattaactgttctaattacaagttactctttgactcttcagatcttatttccttgatgattagactggaataaacaatttgagggcaggtactataacacctgtcatcccagcactttgggaggccaagacaggtggatcacttgaggccaggagtccagaccagcctggccaacatggcaaaacctcatctctactaaaaatacaaaaaaattagccaaatgtggtggctcatgcctgtagtcccacctactcaggagaggctgaggcacgagaatcgcttgaacccagggggtggaggttgcagtgagccaagatcgtaccactgcactccagcctgggtgacaaagcaagactgtctcaaaaaaaaaaaaattttttttttttgagagagaaaaaaatggcctctgaaggctgggcgcggtggctcatgcctgtaatcccagcactttgggaggccgaggtgggcagatcatgaggtcaggagatggagaacatcctggctaacacatggtgaaactccgtctctactaaaaatacaaaagtaaagtcccagctactccggaggctgaggcaggagaatggcagagcttgtagtgagccgagatcgtgccactgcactccagcctgggcaacagagcgagactccgtctcaaaaaaaaaaaaaaaaaaaaaaaagcctctgaaatcatttcaggaactaaaagctaactctggctctctctacatctttatattaaagggtcctggacctgtgattgttgaggtggcagggaaaactgctacctgttcccattcctaatagaaaccatcttttgatgccattcccattgtatttttccacaaaaaatgtatttacagatttctgggactgaaaaattgctgaatttgttaaaagagaagaaaaaggtggcccagcaagatggctcatgcctgtaatccctgcactttgggaggccaaggtgggtggattgcataagcccaaaaattcgaaaccagcctgggcaacacggcaaaaccccatctttacaaaacaaaacaaaacaaataaaaaaaaaactggccaggtgtggtgacatgcacttgtagtcctagctactgccagaaggtggggagggaggggtggctgaggtgagaggatggctgtcacccaggttggagtgcagtggtgccatcatgtcacactgcagcctcaacttcccaggctcaggtgatcatcccatctcagcctcccaagtagccagaaccataagaatgcaccatcacgcccagctaatattttttattatttttgtaaagacagggtctccctatgttacccagactgtcttttattccccgcaagacggagtcttgctctgtcgctcaggctggagtgcagtggtgcaatcttggctcactgtaacctctgcctcccgggtttaggtgattcttgtctcagcctcccaagtagctgggattacaggtgcctgccaccatgccagggtaatttttgtatttttagtagagatggggtttcatcatgttggccaggctggtctcgaactcctgactttgtgacctgcccgcctcggcctcccaaagtgctgggattacaggtgtaagccaccgcccccggccccccacttttttttttctttttaggagacaaagttttctacgttgcccaggctggcctcaaattcctgggccaaagcaatcctccagcctctgccttccaagtagctggaactatagacatgccacatatccagcatgcatttttatattttcaaggtatttccatatctatttgttcatttcagtttatgtactactgtccctatttgacagctaaggaagtagggcacataatcatacttcaagcccatagttcaggtggaaatggactctaggtcttctcatgccaaccaggagtcatggcttatttttcttatgcacagaggctatcacagttcaggacattttagtgaagccagaagaaacaggaattacatggccgggcacagtggctcacgcctgtaatcccagcactttgggaggccaaggccggcagatcatctgaggtcaggagttcgagaccagcctgaccaacatggagaaactccgtctctaccaaaaatacaaaattagctgggcgtggtggcacatgcctgtaatcccaactactcaggaggctgaggcaggagaatcgcttgaacctaggagacagaggttgtggtgagccgcgattgcaccattacactccagcctgggcaacaagaacgaaactccgtctcaaaaaaaaaaaaaaaacaaaacaaaacaggaattatgtagcatatataaattatgttttaaactactatcatataacctagtagttctctccaatgtaatcaacatatcccttagtaaaatattgtttctagagttataaatagtattctgccataggccacccagatctcagatctcatcttgattcaaatgggcactacacaagaatacatggggtgtttaatttatattcattttgttatttttcaggacagtgcctctaagccaggaaatagccttcaagtagaagtggaaacatccacaggctaagttaaatgctatattcaagccactcaatgttcacagtcttattctaagtaatcaggccactgacccaagtgtcagtcagcatcatcttcaatctccctatgaaaagctgaaggaaaagaaaatctaattaaaagcccaagaaaaaatccactttaatcaaaactgcaactaaaaggcaaaggaactttaaggtaggaaaaaaacttaagacatgaaaaaattaggaattacaaaaagggatgtcaagagggaaaaagaggagatactgcgattttttttttagaatagtcaaatacagcagtgagaagagggaaagagtagaataaggagtttgatctgtaaccatcaattaagattaaatcactaacttcagcctgatactgtaatttaaatgactaaaagcaagccaatgaaaaatatgactttccaaacagaagaggcataaaactatagaaaaataatgaaatacgaagggttaaaatacagagaaccacaattttaggaatattttactatgaagaacaggaaactgaatgtttaagtatatataaaagcaaaaggaaggaaacaatacatttagttccatcaaaatcaacagaaaaccatctactatgagcctccgttgacaacttctcccaagtgaaacaatacagatgagggtcacagacttagccagtgataggacctactactctgtaatcatccatgggcaacagacaagggctgtcagaggacccaacagacggaagccagtgctagaagacagaactagtttcctcaaaaaaaaaaatcagtcaaagccaggaacggtgtggctcatgctgtcatcccagcactttgggagcctgaggcaggaggatcacttgaggccaggagttcaagaccagcctgggcaacacagggagaccctagaaaaaaattaaaagttgttttaattgaaaacaaatcagtcaaacaaattactggtatgctttaaaaataactgtgtgacagaagaattacttgaacccaggaggcggaggctgcagtgagctaagatcacaccactgcacaccagcctaggtgacagagtaagactccgcctaaaaaaaaaaaaaatcagcatgaatcacaaaagaaagatacacgccagatcattattgttcttaaggtgaagcaatttagtcatcttagcgtaaacacacatatgctttagtagacatattaagaaatctctggaataaaaaatgaccagactaactagaaagcagttgaatcacccacctaaaaaaccgacttactaatttaaagcacttaccatattttaaaatcttttttaccttagaagcctttttcacttcaggttttatatttaaaacattttccaaaaaagtcagggtttgtgtcacctcttgcagttggaaatcagtttcaactgtaagttactttaaatccagtaccaaagcactgagattccaaagcagttgtcacattaactccatttcagaatccaagtacctgactgcagtctctagtaagagaagcctctaactggaaaagtaacaggaaaagttgtactttctcatttcaaatttggggcctactatgctgaatgaagaaagagagaacttcaagttcagcctaataggcatttactacaaataatatgacaatggttggcactcaattttaaaataaatgactaggccaggcgcagtggctcattcctgtaatcccaacactttggaaggccaaggtgggaggatcgattgaggccaggagtttgaaaccaacctgggaaacatagcaagaccccatttctataaaaaatttaaaacttaggccggatgcagtggctcacgcctgtaatcctagcactttgggaggccgagacaggtggatcacctgagatcaggagttagagacaagcctggccaacaaggcgaaacccggtctctactaaaaatagaaaaaaattagccaggcatggtggcgagcgcctgtaatcccagctacctgggaggctgaggcaagagaattgcttgaacctggctggggaacagaggttgcagtgagccaagatcccgcccctgcacaacagcctgagtgacagagcaagactccgtctcaaaaaaaaataaaaataaaaataaaaaattacccaggctttctgctgtaggcctgggtggctgctataaaaacgggcaagttcatgaaacctggaaagtggtgctgttctggccagacgctatgccagatgctactcaggaagcaaagatatcatcatgaagaacactgatgatggcacctcagatcgcccttacagccatgctctggtggctggatttgaccactatccccacaaactgacagctgttgtgggcaagaagaagatgaagaagagtcaaagatcaagtcttttttttctttttttttttgaggtggagtcttgctctgtcacccaggctggagggcagtggcgcaatctcggctcactgcaacctccacctcccgggttcaagcgatcctcctgcctcagcctcccaagtaactgggattacagacgtgcatcaccacacccagctaatttttgtatttttagtagacatggggtttcaccatcttggccaggctggtctcgaactcccaacctcaggtgatccacccgcctcagcctcccacagtgctaagattacaggcgtgagccactgtgcccggcctttttgtttttgtttttgttttgagacggagtttaacccattacccaggctggagtccaatggcagacctcggctcactgcaacctctgcctcccgggttcaagctattctcctgcctcagcctcctgagtagttaggattacaggaacccgccaccacgtccagctaattcttgtatttttagtaaagatgaggtttcaccatgttggccagactggtctcaaactcctgacctcaggtggtccacccgcctcggcctcccaaagtgctgggattacaggcatggaccaccgcgccccgccaaagatcaagtcttttgtgaaagtttataactactatcacctcatgcccataaggtgctccgtggatatccccttggagaaaactctcatcaacaaggatgtcttcagagaggctgctcttaaatgcaaggttactgagaggccagggtcaagttcaaagagaggtacaagacagtcaagaacaagtggttcttccagaagctgtggttttagatgtttcatttaggttattaaattttttaattaattaaattaaaatcaaaattagccaggcatggtgacatgcccctgtaatcgcagctactcaggaggaggcttaaacaggaggatcgcttgagcccaggaatttgaggatgcagtaagccaggcttgtccaatccgcagcccaggacaggtttgaatgaggcccaaaacaaattcgtaaactttcttaaaacattatgagtttttttgtgattttttttttttatttttagctcatcagctatcattagtgttaatgttttgttttggttttggtttttttgcttttttttaagatggagtctcgctctgtcacccaggctggagtgcagtggcgcaatttccgctcaccacaacctccatctcccaagttcaagcaatttctccctgcctcagcctcccaagtagttgggattacaggaacccaccaccacgtccagctaatttttgtatttttagtaaagatgaggtttcaccatgttggccagactggtctcgaactcctgacctcaggtgatctgcctgcctcggcctcccaaagtgctgagattacaggcgtgagccaccgcacctggccagtgttggtgtattttatgtgtggcccaagatatttcttcttctcccaatgtggcccagggaagccaaaagattggacacccctgcagtgagccatgatcacaccactgcactccagcatgggctacagagtgagactctacgtcaaaaaaaaaaaaaatacataaattaaatgactaaaatccagaaattgcagtctttaaagagtaaattttatagcatgtgaccaatctcaatgaagcttttattatttaaatgtgttttaaaaataaatgacactcagaacgaagtattccatataacataaaccacctgtctctatgactgagagaccacgaaagtatatcttaaaattctgatatatgaaaagatcatcaacttcattcatggtcaaagaaatgcaaattcaaatgatactgtaggagccaggcactgtggtacacacctgtagtcccagctactcaggaggatcacttgagcccaagagttaagaggctgcagtgagctatgattgcgccaccacactccagcctgagaaagagagattccgtctctaaaaaaactttgtaagggccagaagtggtggctcagacctgtaatcccagcactttgggaggccgaggcgtgtgatcacttgaggtcaggagtttgagaccagcttggccaacacagtgaaaccccatctctactaaaaatacaaaaattagctgggtgtggtggcacacgcctgtagtcccagctattcgagaggctgaggcaggagaaccacttgaatttgggagccgcaggttgcagtgagccgagattgcgccactgcactccacctgggtgatacagcaagactcagtctcaaaaaaattgtaaggccaggcatggtggctcacgcctgtaatcctagcactttgggaggctgaggtaggtggagtgcttgagtccaggagttcgagaccagcctgagcaacatggtaaaaccccgtttctacaaaaaatacacaaattagccaggtgtggtagtgcattcctgtagcctcagctactggagggggttgagatgggaagatcgcttgagcccaggaggttgaggctgcagtcggccctgatcgcgccactgcactccaacctggacggcaaaacaagaccctgtctcaaaaaaaattgttctttttttttttttgagacggagttttgctcttgttgcccaggctggaatgcaatggcacagtctcggatcaccggaacctccacctcccagattcaagtgattctcctgcctcagcctcctgagtagctaggattacaggcatgtgccaccacgtcaggctaattttgtaattttagtagagatggggtttctccatgttggtcaggctggtcttgaactcccaacctcaggtgatctgcccaccttggcctcccaaagtgctgggattacaggtgtgagccaccgcgcctggccaaaaaaaaaatgttcttaatgaaaagatatcattgtacacatttccacctatcagattaacaaagattataaaatttcataatatccagggatggtgagaaggaaatgaaaaccctaaaatattctgtgcatacacaggcatatctttgggggcaatttatttacagctttcaaaataaaaagtaaacataacccactgattcagcaactctacttaagagcttatcctatacacatacttgtacaatagtacaacagtacagatatgaggatgcgaaccaaagagtctgagacaatttaactgtccatcaatgggaaaagtgaagtttacatccatacagcgtccgattatgcagttgttttcaaaaacaaacctgagttataagtattgaattgaaaaatatgtttggaatttttttaaattcaagatactatctatagtatgcttatatatgcagagaaaatgtctggaggaatactgaattgtgtgaaagtgattacaatgagtatatattaattttataattataatttgtatttcatttgaacacatgaagctatcaaataaagtcatttaaccctggtgttaaatcagcctatgctatgatcccaacctatctttccagtgctctatggttctggccaaaccagtctgttccttctttgagaaaccagtcccaaggactccctctccaaaatgctcttactatgtggtctgaacagctacccgctacagcttcaaatacaaattacctgagttgaaaaaactacgcctgcctgcatctgctataaaacattttaaaagagatcttttttaaaaagaaaattgaaacacaatttaataatccccatcatagaagcagcaaaagtactcaccatttcccaagttttccaggctctgtgcctttgcttcatgcaatttcctgcctcaaatcctcttagctacttatcacatgtccaaatcctgccaatccttcaaaacacaggtgacacaccaactcctacaccaaatcttccctaatgcccccatccagagctgattctctttcttaaaccacagtatcaacaccttttgaggcactttcttctacctagtactcagttgtgtacatgtctcatctttcccattaatgagaaaatcatcatgggcacaatctctgtcttggtcattttgtatgccctattttgctacattaattaaacttgtatttcactaaagcatataataaaaagaaaggggcaagaatctaaaagttaaaaaaaaacaggcttttagtatgcattcatttgaattaggtcttgtttacctgcaacaaacgctatgtaagaaaagtacgaaaggtaagatccttccctctccatccagctgcccagggccctggtatgcctcctgaaaaggcaataactatgggttctaagaagtccttggacactgcaacttcttaacacattcaggacattggaactaagttgacaaaaagaatttataagttatattttaaaataaatttatttatgacaattacacaattgcacagtttacatgctgaggcaaaatatgacgttcaatacatgggaagataaactgtataaaactatctgagctgtgaaaagaagtcactgttcggccaggtgcaatgacttaacgcctgtaatcccagcactctgagaggccgaggcgggaggatcacgagatcaagaccatcctggccaacatggtggaaccccatctctactaaaaatacaaaaatcagctgggcatggtggcacatgcctgtaaggtcccagctactcgggaggctgaggcaggagaatcgcttgaacccgggaggtgaaggttgcagtgagccaagattgtgccactgcactccagcctggggacagagtgagactctgtctcaaaaataaaaataaaaaaaaagaagtcactgttcattatcgaccatcacagaataaatattccaaggctacatataatcccaagttactaaagttttgaaggggaaggttggtctggttttctgtttttttgagacagagtctcactctgttgcccagactgaagtgcaatgcagccttgacctcccaagctaaatcaattctcccccctcagcatcgcgagtagctgagactacaggtgcacaccaccatgcctggttttttgttttttttttttagagactgggttttgccatgttgtccaggctggtctcaaactcttgggctcaagtgatctgcctgcctcagccccacaaagtgctgggattacaggcatgtgccactgtgcccagccaactaaagtttctgtagcgtcaaaagtgtttaaggattccacaaagactaaattctcactaagctatgcaaacaaaggtgctaaaccattccaaccaaaatatgaaagaaacatgtagatgttttataaagctagatttcctaagaaatattaatattaatgaaaacttttctcaatatattaatagaaacaagatgtctgcacatttttccagtttatagatgttaaaaattaagtctcaacaaggtctttaatcatatgtgtataatcctaagtgtataacaacttaggaaatttcagtaattattcctacaataatgaatcacataaaatatatatatgtacacatggcagattatgctaccaagatcagaatgttcaaatcagaaggcagttcatcttgttagaaaatttacccagcaataaaaatctgaagccatcgttagatcaagacaaatttcagtgaaaattctatactggatactgaactggaggtggggggttattcttacaaataatactgaaggattacaataatactgtcaaattatcaaatgtgttaatactacattagccattctactggtatttatggcacaaactgccagatgtagtgcaatactgattcttcccttcctccagagtaagagaacccctgatttttgactaggcacatagtaatttccagcacagaatatactttctagcttctcttgcagttatgtgtgaccttgtgattccgttataatcgaagggacacagcagaagcgatatgtacaatttctggaaagtatcttcacaagaagggagtgtgcccagcttttgccttttcctccttcctgctggtgagaatgcagaactgatgtgagaaagtggagaagccacctctgacaaaaaggaaagagttacatgttgaaggctgggtcccctaatgagcatgaaggtagcatactggttcaggactgtctatgagatacatgaaagaaaggaaacttctatcttgtttaagccattgttatttttggtttctaccactcactgctgaatctaatcctatctaacacacggcaaaattatagagaaagagtactatatttattaaactttactttttcaaatgattttttttgttttgttttgtttttggttttttttttttttttttttgagacagagtcttgctctgtcacccaggctggagtgcagtggcgtgatttcggctcaccgcaacctcggcctcccaggttcaagcgattgtcccggatcccgagtagctaggattacagatgcccgccaccatacccagctattaaataattttgaatacatagtttaaacttactaggattaaaataaactcattttggggggccaggcgcaacagctcacatctctaatcccagcactttaggaatccgaggtgggcggattgtctgaggtcaagagttccagaacaacctagccaatatggtgaaaccccatctctactaaaaatacaaaaattaagccaggtgcagtggctctcgcctataatcccagcactttgggaggctgaggcaggtggatcacttgaggtgaggagttccagaccagcctggtcaacatggtgaaacctcacctctactaaaaatacaaaaattagccaggcatggtggcaggcgcctgtagtcccagctacttgagaggctgaggcaggagaatcacttgaatcccggaggcggaggttgcagtgagcagagattgcaccactgcgctctaccctgggcgataagagtgagaatccgtctcaaaaaaaaaaaaaaaacaaaaacaaaaattagtcaggcatggtggtgtgtgcctgtagtcccagctactcagaaggctgaggcaggagaattgctcgaatctgggaggcaaaagttgcagtgagccaagatcgcgcggttgcactccagcttgggcaacaggagcgagactccatcacaaaacaaaacaaccttcttttttttttttttttttttttttgagacggaatttcacacttgttttccaggctggagtgcaatggcgcgatttcagctcactgcaacctctgcctcccgggttcaagagattctcctgtctcagcctcccaagtagctgagattacaggcattcgccaccatgcccagctaatttttgtacttttagtagaaatggggtttcaccatgttggccaggctggtctcaaacttctgacctcaggcaatccgcccgtgttggcctcccaaagtgctgggattacaggcatgagccactgcacccggccaacaaacttatttttgattattcaaataactaagctctaaaatgttttttctacactatatttgaggtataaaattgttattatcaataattttttggccaggcacggtggctcacacctataatcccccagcactttgggaggcagaggtgggcagatcaccggaggtcaggagttcaagacctgcctggacaacatggcaaaacccatctctactaaaaatacaaaatttagccaggtgtggtggtgatcgcctgtaaccccagctccttgggaggctgagacagcagaattgcttcagcccaggaggcggaggttgcagtgagctgagatcgtccagcttggtgacagagggagactccatctcaaaaaataataataataataataacttcctaagtatgccttggggtcaagcgattaagccaaatctcccttatctctacctcaataataccatacgttaatattattcattcatttaacaaatgaatgcctactgtactcttcgcaagcaaggtgcactgaagtgaccaaagcagatgatgggcctcttcctccgggagtttgcaagccagtatcaatgcagccgaggcagtagaagcctctgcttccctcttctctagcctccaagttcatcactcccctgctgtcatcatattcttgcttcaggctacaatatgagagtacaatgtgactagacttcagctttgctctgctaatataatcacacataatcatattcctcaaagatgacactcctgttaccaaaattagcatcagcatcttaccaaaatgccatagcagttatcactgatggtgggtcagttttccacatggcaaatcttatttatcacaagatatctttccctaactgtaccttatggggttctcttatccttacattttgttgttgttgagacagggtctcactctgtctcccaggctggaaagcaatggcacaatattggctcactgcagccttgacctcctaggctcaaacaatcctcccgcctcagccttctgagtagcttgggctacaggcacgtgctaccacgcctggctaatttttaattttttttgcagagacgggggtcttgttacgttgcccaggctggtctcaaactcctggtctcaagggagcctcctgcctcgacctcccaaagcactaggattacagttgtgagccaccacatccagctttatccttaaatttgaaaaatactttgcagttccgccgccccccacccagtcccagggactatactgaaaaatgtcagaatgtagggctgcttaggcagatagccaaatatttttagttactcctcacaggccattacatcaacctcattagagatttgaagccagaccaacaagaggtcttgctctttccctcaattgcctttcttcttgaatctctctaagaggatggaacactaatcggattgggtcaagagtccacagtactgattgaaccctgtgtacaactatgaagatcaatgaagattaaaagttacacaaatcttgattcaagtgcaagatagaaaaaaaagtcacatacatgtaagagtttgtgttcttgttcttggtcatttcactcttacacactctaaaagactaattgttggggtcttctgcaaagccatcaaccaaagagtagtaagacagtgaaatttaggaggatgagagagcccttgactagtcctggagcttaagtaatatgatgtcaccctgtttactacacaaatttacattggtattttggccaaaagcccaaattaataataaagtaatacttctaatttcctacttgccattgttctacttatataaatctccttcagaggccaggcgtggtgggtcatacctgtagtaacagcactttgggaggccgaggtgggagaatcacttggaccctcaagatcgaggctgcaatgagccgtgatcatgcaccactgcactctagaacctgggcaacagagcaagaccttgtctcaaaaaaaaaaaaaaaaaaaaaaacctccttcaggaagctaagccatgatattctgatcatttattaacaccccaaacttcaaactgtactattactctattcacttggtatttaatcacatattgtttttagcatttcctatattcaaggaatagcaaacattttagaattggtacctcaaagagaatctattcaaaccatctagagttcacccattgtctcctgcagatctcctgattattataaacaacaaagagaacatactggaaagctagatctctagatgacaataacagtaataataaaaagaggctgatatttattgaccatttactatgtgccagggacctttttaaatactttatatgaattaattactttggtcctcacaacaaacccacgagtattattattatctcaattttacagatgaggaaactgagacccagaaaggtaaataacctgcccgaagtcacagagttaataagcagtgggctgcagattgagtctagagctcttaacaacttttctgcaatagcataatagttagttaacggtagacaaatactacagcttggtaagttctgaaacttagggccaaaaagatattcaaggaggcaaaagacaacacagatctgcatctccagagagagattttcaaaatttgaggctggaccaaattggtgtttaaacaaagtattgagggagggctgggtgcagtgactcacgcctgtaatcccagcactttgggaggccaaggcaggcggatcacgaagtcaggagattgagaccatcctggctaacatggtgaaaccctgtctccactaaaaaatacaaaaaattagtcaggcatggtggcaggcgcctgtagtcccagctactcaggaggctgaggcaggaaaatggtgtgaacccgggaggcagagcttgcagtgaactgagatcacaccactgcactccagcctgggcgacagagcgagactttgtcttaaaaaaaaaaaaaaaaaaaaaaagtactgagggagaggttaatggatagaatcatgaggaacatcaatatttaacataaactcagcacattttaggtcaaaatgataatacagtaaggtagtatttgtgtatattatagatatacaacatatattacaaaccaaaatacataatgattatccctactccataggaagtagaacataatttaactataattactataggtttatggtagcatctctgttggctgtagctaagatttttcatgctaagtccttaggcaggaatgcaacctataataatgttactacaagagacaataatctgctttaaaatctttcttcagacatgctttccagggaacagacagttgtgaaacgaaagtcagcctaaatagatggaccatatttcaatgactctaagactcataatgtttgttttacatttgtatagtatgccactggaattaggaaaggtctcacagaggttaactggcatttttttcattcttagcagtatacaaaataataattcattttacaaatgatggcatcttggagtcaataaaatgtttttcagaatacatctaattttaagtgtgaacacacatactgctgtagtcacaggaaaactttctgccttcaagagatgtataatctaataaagagaacataattatctctaaaatataaatggaagtaataaacattaatacaagacatgaagtgatcaaatgagtgagaaggttataacaagaactgaagaaaaggtatttaagtggtaggaaataaaagtggccaaaccaaaaaaacttcaggcactgtgtcctgagcacagtttgttgtttttgtttttgttgttgttgttgttgttgttgttgtttgagacagagtcttgctctgtcgcccaggctggagtgcagtggagcgatctcagctcactgcaacctccgcctcccgggttcaagcgattcttccacctcagccttccgagtactgggattacaggtacccgccatcgtgcccagcaaatgtatttttgtagagacaaagtttcaccatgtttgccaggctggtcttgaattcctgacctcaggtcacccatccgccttggcctcccaaagtgctgggattacaggcatgagccaccgcgcctggcctaaagttatttttaaataaaataaatccagacatagtggctcatgcctgtaatcccaacactttgggataccaaggtgggtagatcacttcagctgagaagttcaagaccagcctgggcaacatggcaaaactctgtctctataaaaaatacaaaaattagctaggtgtgatggtgcatgcctatggtcccagctactcaggtggctgaggcaggaggatcatttgagcccgagggggtcaaggctgcagtgagcagagattgcgccactgcactccaacctggatgacagagcaagacctttcctcaaaaaatttaaatttaaattaaaaaaaattaattttacaggtgcatctcaaactgtgttctattaaactagaatagtagtatctatcccatgagtatctcatgagaaagaaacaggtattctttggggtaagggaggaaaatgaaaaacaaaaaccctctatagtataaaatgtttctgaggctttaaagagctcatgtgcattataaacgtatttcaccccacacttaaaatacttgcagcatattaggaagccataaatacagttcgggaaacactgacttgggtaggcaggtaggtagacaggtagtcagtaggcgggcagagtcacagaaaataaaaggagaataagacaaatgtaataaagtgataccacctaaaaaaaggatcataactgactacgagttatgactatgaagtctcttgaaggaaaataaggtgttagaataagctatcaaaatcaacaatagccgccaggcgcagtggctcacgcctagaatccacttgtgtggatatacttccccagcatagccaggtcctgccagagaacatttccagtgcctccccaggcagttcacacagacagacatatgcccacatgctcatctgctcacactccccctgaactgtattcaccccacacacactgagtgccttcatcactgtactcccttgcttcccaccccagaagcaggaagaaggtcaagaatcagacctttggctgggcatggtggctcacacctgtaatcctaggactttgggtggccaaggtaggaggatcacttgagcctaggacttcaagaccaacctgggcaacatgacaagacttgatttctacaaaaaaaaattagccaggtgtagtggtacacacctctagtcccagtcccagctactcgggaggccaaggagggaggataacttgagcccaggagttcaaggctgcagtgagctatgctcatgccactgcactccagcctgaacaacagagcgagaccctctctcaaaaaagaatcagacttctgggagcctagggaacatatacaggtgccaatgaatgtgtccgtgcatgctctgctaagtgtgtgcatggctgcgtgagctagaatgggtttttgtaggaggagctctgccctgctgctgcaggactgtctgaagatgctgcacagccatgcttcctcacaagctctcttttaaggttagtccaggccaaccacattaatattgtcccctttggggtggtatatttattgcaacacacagcctggacattcatatacagggccatggcactagggtaaggcgccacaaactcctcctgctgaggaggcaacaaggtatctggtcgctaaagctgggtgggacccatatccctgacagtattccagtatgtatgaggcactgcagacctggggtttttgttcttaggtgaggcctggctcgtacggcttaaatttctgttctacttttccccaacttgagatgactcggaagactttctgttccttgcaatgaaaaacagcctaaccaaagtccttaaaagtcatgtatataactactttaaaattaagataaaacccatggcttcgacttctgatgcaaatacccaagacaaatagggtatgaggattcctcaaataccgagtggtttatgaattagaggccacatcattttataactaaccatataaggaaaattttcacagttaaatatattgctcacacttgctgacatactggcaaattttaccagttaaaaatatgccgtgtgcagtggctcacgcctgtaatcccggccctttaggaagccaaggcaggtggatcacttgaggttaggagttcaagaccagcctggccaacatggtaaaaccctgtctcttctaaaaatacaaaaattagccaggtgtggtggcacatgtctgtaatcccagctactcgggagactgaggcaggaaaatcgcttgaacctgggaagcaaagttgcagtgagccgagatcgtgccatcgcactccagcctgggtgacagagcaagactccatctcgaaaaataataataataataattttacactggcacagaccactttaccaaaaaaagcatcttatattaactgtactctctgacctagttacctaatgtacagacacacagtacatcttatattacttggcacaccaacaagttagctatacaaatcacaattccaacccaaacttgaagctagtaaatatatttagtatttgaacttgagttgtgttcaaatgttcattaaattggcctatgcaatcttaacaatgttctaacacatatttaaaatgctcatttctcctccattatttaaaaaaaaaacacacacacacacaaactataactctgttagacaagaaaccaaacataagccaaaaggctcggcaaaatcacacttaaataggacaaggagagcttcaacttcagaataattatcaggataccaatcacacaaatatgattcaacaatcacttaaatatcattcaagaggaattcctggtagtaaaaaaagaaatcccgtaattaactagagcacagcattatcagaaactgattatgtaaaacaatagcttttctttcaggatgtgtgtatgtgtgtgtaacgaagttcacagctaggttacactaatgactcacttaaacatttgaattttctgctatcttaacctttaaatcgactgcaaaagtagctgccaaaagtagcttagtaggaaagcatactactctcaaaagaacttggtatgtccaacttattttactacttaaattttttttgatcactgatatttgaaactaatttttaagtaatgaatgcttactaaatccatgataatattcagcatatacaggtttttagaagggcacagattatattcttatatgtgtgtttttacagcacctggaacatttctgttcagtatctgttcagtattacacataattattgcaggacctgacagtgtttactatcctattttttcctttttttttttttttttttagacagagtctcgctgtgtcacccaggatggagtacagtggtgccaatctcagctccctgcaacctctgcctctgagttcaagcaattatcgtgcctcagccccccaagtagctgggattacagccacgcgccaaagtgccaggctaatttttgtatttttagtagagacgaggtttcaccatgttggccaggctggtctcgaactcctgacctcaagtggtccactcgccttggcctcccaaagtgctgggattacaggcgtgagccaccgcactaggccttactgtcctattttttaaaagctttttcgactgaccagtaaatcaaagttgaaaaggtaactggtacattttatttcttgatttggattacctttttgttgtgaattggttctcagttctagtttccttgtgacaaaacactgatggagaatatattgaactgaaatcccctgaatccattcccactgagaaaataatacatttgaactgttcacatttcattgtaaaagatacacaactttagagattactcttgaagttttgaaagtaaagtgaatcagaagtcacattcctagaagcagtcagtctggaacagatgtttatcctacacacccagtcccctttaccactgcaaacctctctaatagttcattacattagaacaactgagatgggccaggatttgtgaaaataaaaatcctttgagacatttattaagcagattatctctgaaactgcaccttagtttacaagcctttgggcaacaatttgaccctcttctatgataatttgtgtacacactcatttcacattttctctggcttccaattttaaattctttatctaatccatacaataagtcaccctatcagactttataagactactgaaaacaacactactgcaatgcaaggccactacatttgcaaaattgccgattttagtgagatttccctccttcaactcctcctctacccctctacctggtttaaatcccaagaaaaacctctgtccagtgctacaattttactttccatagagtaggtttatttgattttttattaatgatactaaaaacttttttaaaagactgctggtgtatatagtttccaatactgggaacagaaataaaccctctggtttaatatttcaagagaaattatctcataaaagatgagaaggtatcattcaaaggagtcctgggaagtcacaaagtgtaaatacttctggtaacagaacaaattaatgtcgaagcacaaccagtaacataataatgcctcaatgcaaccgtgcctgtcaaaggacatctgtattagcagctcggggaagtggcatttgcagaaaggcacaacaactgcgcttaaaagaaaatcattaagcctcagccattaatcccctcccccatcctcttcgtctggatctttccaaacaattaaccagtagaaggtgctattctgcaacccacatgtattcacaccaacctccatccttgggccacagctgggtttatcccaggtggactagcctattccctgtccagtattcaaaggagccccctaaacagaaaaccagatcttttcttataacccttatttacaaaaacaacattgacagctcaattgccagcaaacctgaccatcaaaccatcacaccactaaaaacatgcaaacatcatcttgctaaatattaacctcaatacaacctttataatattaatcaataaaatctatttctatctagaaagactctgctcacattcactactaagactcaagtgaacaaatcactgtccccaacaaaatcagggtcaatgagaaatacaaaagcaatgagagctgaacgtaaggccacaacatataaagagggattttatctttacatatacaaaaaagaaagagcagcagaaaccacggctgcaaaaggaataaagggaggcagagagaagagaagtctctgaacatgtttttgagtgtcctttagtttccaatgcactcttctgcctcacaaggttgcaaaaacggccaggcatgagatgggtggaagaaagctgtaacagaaaagcaccctcccttcccccatcttctctcttctctcccaaaaagagctgtgtttgtctgtgcaaacctagtcccaaatatgggagagagagaatgaatgtgtgtatggaagaacaatgagccctcagcttggtattgtgtgtgtgtgtatgtgtgtgtgtgtgtgtgtatatgtgtgtctgtctgcctctgcctcttttcccttcgacctcaacaacaacagggagagctggaagccagctttccacccatcccaggccatcaaaatcaaaactggttgataatttacagtagtattaactcagcaagcaaatccatggaacaaaatatcaacccaaagatgattttattattgtacagatccagcttctctcccctcccccaacagactgagactaaaaagaccagtgtacactagacaaaaaggtctctctttaaatggaaagcaattatgaaaactgtttcaaatcttagatgcatcaattcctgctatattaaaatgtctattttgtaattcaccaagttcaccctcttactagttatctttttttgcgtttaaaaattcgctgtgaagaaggctatttcacgattcatacaaaactactttctaaatgtaccttaaaaaagcaacagatactgaaacatttaaagcacccagtttctcaaggacccattttacttaaatcaatgtttgaagtctgtaatccagaaaaattgtaagcaaaccttggaaaagagacagaggaaaatgacaattcaacaatgaatcattctgttttcctttcaacaacttctcaagcaaccagtttcaaaggaagcctgcaacacttttcccccctcctagcagacacacatacacacgtgtatgtaaaactacgaatctttccatcatcttaaaaattagtaataaatagaagccaccctccttcagagagcagaactaaaacaggatagtaagaattctattctgctgcaagtgactttgggtttcataattttctaatcacatacagctgagaactagagattgggagcacaaagaggaaatcttcccccaatgagaaaatgatactttaataataaagtcctccccccagcaccccgaaatccacaaacattcaagaaatttacagtttcagtccttgacttccttcccttccagtttcagccaataatgtagtcacatgaaatagtttaacctcaaacaagtagaacaagagcatgaataagaggccaagagagagcaggggtcagaaggcacgcaggaacggtcacctggcccggacaggaccaaagaagtgccctgccctcgcccgactcccctcgacttcggcttcgaccccagccttttcttcctgcctccccccgggcgagtgactgctttcacggccgaccctctctgaccaccaggacgaggggccaaaaaagaaagcacacgacccggcgcgggcaagttggacacttaccttcccctaaagcgctacaccatcaatagtgaggtgttcgcggcccagctccggggaaagtggcggggatggggcgggaggccgcgcggaggctgcggggccgcggggcgcagggccgagaggggcggcccgcggggaggcgacgcggaggggctgagggggcttccctgccgtgacctttcctgcgacttgaacctaggctccctcctcctcggtcgggcagatctttcagaagcaggagcccaggatcatgtctggttttgttttccgagggcgagggggctccctgaggatgatggtgatttttttttttttttaatcctcaactaggagagaaaatgaggcagagacaatgtggggagcgagagaggggaaaaggacgggggaggaggcggggaccgaggcccagcggggcgagcgtctcggggtgtgcgggaggctgaggaggctccggagcgcggagggttgctcgcgagcgtctgtgggaacagcggcacctccgcgatggtggcggagccgcggcggagctgctgcaccgacccgccgcccactccccgctcgggcccggcccacctcgcagtatcgcgcccctccattggtacagcgcggtgtgacgcggccgggggcccggccaatgggaggcggaggaggcgggatctctttttccttttttttttttttttttttttttttttaatctttttaataaaatgagcagagaagaaggcggagagaggccgagccttgacaacgccgcggcccggggctcgagggctcgcgctgcaggcggcggccagaggcggtgggctgggctcccgccgcgggcgcgtctttgtgagagtgcgaggccggccctcctccgccgcccgccgcgctccagtaccgccccccgcgccccccgggctgggccgggctggcggcgcgggcaggtcccgggtggggtggggggaagtccggttgatcttgctgttacccgggtcttaattggccttttcagtcattaggacgcggatccatgttgctgcgggctacagagtgggtgtaaaccattctcatatggactctttcgaaattctgatgagcggcttgtaatatttttcaaatagtgtacatgacaaaagatgaattacagaaagaaaaataaaagtgataagtcgcactgcttatttgaaaagaataaaaagtgtcatgaaggcataaaggagagactgtacaggtacagaagggattttagaaagagcagtgtacaactctataaggtacgtgtgaaaaaaaatctaaaaagaggaaaagaccaaacatcacctctttttctttgaagaatgaagtattgtgtcccacttcccgaaagcctgataatcacagggtctatcatgctgtaaagggagtaggggcaggccaaatgatcatattctagttcatataatttatgggattgaggggtttggaaatttcaattatgattagcagtttttgaaatgcacatcatgtttattgagttctttcacagagcctggcacgaatccagggtgaatcatcaacctattgttggtttgttaatattctgtaaatgcttattggtgtccttataccatacactcttcccgaaggagttaaggtccgtataaaataaggggtagaaaacgtagcacaaaataattcactcatctgtttcaaaagaagtgataattttctccttggaaaatctattcagattataatttccacattgaattattcattttttttttttttctgagagggagtttcactcttgttgcccaggctggagtgcaatggcgcgatctcggctcaccgccacctccgcctcctcagttcaagcgattctcctgcctcagcttcccgagtagctgagattacaggcatgcgccaccacacccagctaattttgtatttttagtagagatggggtttctccatgttggtcaggctggtctcgaactcctgacctcaggtgatc

SEQ ID NO: 510 - DNA, 36207 bp, Homo sapiens
  source 1..36207: mol_type = genomic DNA
aacacttcccctgtgcttgcttgcttgctcagtggttacgaaaaaaagccggggctgggagtttgaacacactgttctaataaactttagaagagacctggttgggtgcagctgtgaggaccagattcccccaccccagccttcgcagggggcactatctgggggcaggagcttgcccagggcacttgtgcaaaggccctgaagcctccagtggcaacaggtggcttcacaagctgaagggagtccctgggggctgaagccagggctggccagccttgggaccccccgtgggctatgtcctgaggcaccaggtgcgttctgggaagggggaggcagacatcacatgggaatgcacagaaacagagcgcatacacgcctgcgccatttatttagaacacagagccgggcacagtggctcatgcctgtaatcccaacgctttgggaggccgaggcaggtggatcacttgaggtcaggagttcgagaccagcttggccaacgtggtgaaaccccatctctactaaaaatacgaaattagccaggtgtgatggcacagccataatcccagctactcggcagacagaggttgcagccagctgagactgggtgacaaagcgagactgtgtctcaaaaataaagaagaaaaagaaaacaactcctttacagaagaggtgggagagtcactagtcacaagaacagccctcgagggtggaagggcctggcctaaccacggtcccccaggagggccctggagagatgcagagcccagaaccgggaagggagccttgggatggagtcctctggggagggcccccacgtcctcatcccgggacctgtgcccttggccttgcccttcagcagaagcccaagaccagggtggcaggaaacccactccaggcaacctgcccccagctgctgggtcctgtcccgcaaggctcatcactttttctacttgaggtcaataaaaagtggggcctaaacacccctgggcctcccatttccaaatggggtcccgatgcaaccacagttgcccgagacgtgcgtgcactacacaatgtgtggcgtttcctggcaagggccggagcagctttccgtgtctgcactccatcctttgacgggcaacacacagcagctcccagtctctttaaccccctctcaccatctgtgtgcagtccctatctctgggcagggcagagagggaagccagctctgtgcacagggcccagctccacacagggctggggacaccacccactgtccgagaggcactagaagctgcaggatggtggcccatgatctggggctggaactgggaccccacagcaggtgtggcccagccctgggggagccagccctgggccagcttttgtgagggaaagtttcactgctctgttttctctgcgttgatgggaagagaatcagtcccggctgcagggacagtggcctccccggggcacatgcagaggcctcaccaggcaccaagaccaagaccaccacaaaatctaaaatccatacaaacatttattctgtccctgcctggaggtgagggggaagggggtccggagagccccgcagaggaggacggggctctagcgggaagacagtgtccggaggccggtgggctccctctagacggcagaccctggggctaacgaggggccagctgggttctcagaggtcacggagtgcaggggtggggcggcgagtggtggaagccggcgcccccgaagaccggccagcccctggagcacagaggcgggtccagcccacactgcgctgagtgtggccctggcccccactggggtctgtcccacccccaccccgcaggagggaaggcagcaggcccgctcttcccggtgggaaagatgctgtgcaagtcatcaggtttaaattaaaaataataaaaataacaatacaaaataaaaaaagactgtctcaaacaaacctgggacaagcccgccccgcgacccacgtgaggagcagaggtgccggccaccacccgggagggagggcctggcaggaggggcaggaggggctgcgggccgggtgggggcgggctctgtcctggtctccatcagcagcagtttctagagacgccagagggctggggggcagagggtggggaccggcggaggggtgcggcaggacgtgagcgggggtgggctgggctgggcgttctctggccgccagctcatcccgctgctctgggctgcctcggccaggtggacgggttaccggagatttattgcactgttttggaagaggcatggggctaaggaccagcgggacggcaggagaggcgggtgggaggcgggcaggcgtcatcgcttggtcttggcgtcttctcgaaccttccagatcaccaggtgcatgcaggcgccggcgtcctcgctggagctgtgcccatccactgcggggcagatgcggtgagcacccggcccctgcgcagggacggccccagggcaggcaccggcactcaccattgtcctggatgatctgtctgaggtagtcggccatgaggttccgcagggaccgcttgtaggggaggcccaggcggtgggggaagagcacagacgtgtccaccacggtgctgtggatgacctgtgggcagcggcagagatcagcgcacgtggggcctgcgcaggtcctgctggagaaccgcgcgggacccgggccggcagggcaccttcagggccaggaggtcgctctccaggctgtgtccgatgaggatggtgtcagcgctgaacatgctcagcagaacggcctggacgtcacgcagcgtgacacttgtgtcggcaaggtcagcctccgtcacccccgaaaacctgggggaacgggcaggaggggcaccagggctcagcctggaagcactggctggtggggcgggggagggtgggtccctggggagaggcggctgggagggctcccagctcgtggagggcactggccacacctggtgttgtagtccacgatctcgttgtcaggcttcacgaaggtgtcataaaccacgtgcacgtccgtgtcgaccaccgtgacgcgcgtcagctccaggccatatgtggtgtaggactgcgggcaagggatgcacctcagatgtgtcccaggcaccggcctccctccctccccttccctgcccctttgagtctccagagcccctccaggcagaggcagtgaccagagactctgtgggacttctaggagaggccgagtggggtgtgacctcagtaaccccctttcgcaaagccctcctgcctcccattcagaggcagagccggggcccagtgcccggtgtgcttggctctgctgggaagtatggggtgttggtccagggcaggagccacaggcaccggtgctgcgagagaaaccctgagcgctggccggtgagccaggcccagatggggccagatggggcggccgcaccaggccaggtcctccccaatcctgaacccgacgctgggcagagaacagcctcaccatctcgcagtccagggcgtagatccccgggtgggtgtctcctgagagctctttctcaaaggtcttcacgaagccctcaaggcgctccttccggccatcctgcacgtgttgctgggggtggagaaggcaggtgagggcagcttcggggtgcagtgggggcgggggtggcagcagcagcacatctctgagcccttcgggaccatcctatccatccatcacgcccattcactggttgggaccctggtgagcaggtggggaagggggcttgccaagaagacacagggaggacggcttcccaggatgggaagtggccagggacagggcctggggcctacgggtgctacgttctctgggtaacacaagaaaggctgcccgggggcccagaccctgagcccaggactgtgctgtgtcccgagaccccacaccaacgatggggaggcagaagtctgttgagaacaggcagaggggactgggacgccagggctcacctttgcgacttggcagccgacagagccggcggcagccgagcagcacatgtactgggtctcccagcctccggccactgcaggggacacagacacacagtcagggcccggccaggcccactccacagcccccggggcactgaccacctgcatctaccgagccctactagggagtgaggactgaggacaggaggcctcagcctcttggtggagctggaagcagaccaggccccggcagtcgtgtggcagccaggacgcccaggcctggatccagggagaccagtgccctctgcagaggcctcttggcagcgctgccccgggcagcaccctccaggtatccctgaggcgatggctttaggggccgccacagggctgtgcaaggctggccatgtgccctgagcgtggctgcgtggttgcctgggggattgaatagaaccaccaggccaagggtgggacaagcccctccgctcctggggccagcaacctccacatttccatggaccaagggcacaggaaggcagggacacagggcctttcaggtggtggcatttgaaccttgtcatgggaaagctcttgtcttacttttgcataaagaacaggtggagagaaaatgaggccaagggctagccccggctctgccaaagacggtgcagcccagggaccctgagtgggatggagggcctgggtaaagccttaccccagttctgggggcctcaagggagggcccaggttccgggggccatgggtgggaaggggaaggacccgggtaaggccttaccccggttccggcgcagccgtccccagtggtaataacactcctcgtcccggatgcagcggcctgaagaggacacgaggtactcggtgccacagcggcagcaggtcctgcaggaagctgtgggtggggacccaggtggaagctgaggctcacgctggggcccgcatgcccggccttgcccacatcccgcacctgcccacctaggccgtcgcaggccagcgactcacagtccttgggcctcttctcctcagctgtgaagatgattgcgcccccgggccgctctgggtgcgggaaggggtagccgttctccttgagctggtcctgggtgagcaggtactccctgaggcggctgtacagggcagcccctgtggacaggcacagtggtcagcccctgcctgggatggcccacggggcggtagacaccaccgggaaaggcggctgggccggcaggggcccacgaagcaccgtgtggcacagcaggggctgggccggcagaggcccacgaagcaccgtgtggcagagcaggggcagggccttacctttcaggtcctccacccgggggctgcttggacggctgagcgagaagctggtcttggcggccaacctgccccccaacaccacctcgtgggacacaaccctgcggccactggtttctggaaggaagggagggaggggaggagggtgtgaagtagctggctcagacccctgccccgcctgctctcccacccaccctgccctcctcagacctctgcctcaactccccctttctgggacagcaccccactgaccccgggttccagcctgacccgaacaggagaggcagacatgcggtgagccagggacgcagggcagccgccagctctgcaggccccagagctgcacggaggccccacacccaaagtcttcgtcccctcccctcaagcgaagggggaagggcggggagaacagcacgggggatctaatggctttcgagggctttgagccttcatgggccacccagcctgcgacgccaacccagggcccctccgagtgctaatgcaggcggggacgggggcaggggccggtgatagcttaatgcagcctggagaggctgcaatgaaacgcccaggtctccgctttcttcctccccagagcttaatgcatggagctcgcccagccctgggcctcctgctttgaagaagctgccgcagctccattagcaggcggcccctcggctcggcttggagaccccactcagcggaggaaggcggctgacagcgaggacaccagggccaggtccgtcctacacagaagcctgggaaccaggcagcaggcagcccccccacagcaccgcgctttccttttgtctgagactgtggctgagctcagggctgtgaaggtcccagcgagggtcccagcccagctgccaccccaagagcaaccctgagcctcccccgcccacccgccaggactcactgctgaggccgggcacagcgctgggggccaggcccctgagcttcttgagggtgttcacggccacattcaggtagatgttcttgctggggctgcggtcataggccaccttctcctcgttcagtgcctgggggacaggcggtgcccagctgaggccatgcctgcctggtgccggggagccccagcggtggggtcgccatggggtcggggacttgcatctctcccaggcagctccgggtcacagctgcggctgagaggccgggggatgtctggggaccaccctggacccctagtccccacccgaccggccagataggaactccaggacctcaccttctctatggcctcctggttggaggtacagaacttgagacactcctcgatgaacaggttgagatagcgctggcggatgacggtggggactttgcccccaaactctttggggataatgggtttctttaaactctagagggaaggcaaaagctgccatgggtgagggcctccacaaggcctccagcggggaacgcagacgcgatgaggccgtgcccatggctggaggcaagagtgaggtgcgctgggacagatcagcctggctgcagtagggacagacacgccaaggcaagacaggagcagcaggggaaactgagggcagcggaactaaggtcatgggaaactgaggccatgggggcacaagggaacttgctgtactttctgctcaattttcctagaaacctaaagttgctcaaaaaacataaagtctattaattaaaaacaaaacaaggccaagcgtggtggctcacgcctataatcccagcactttgggaggctgaggcaggaggatcacttgaggacaagagttcaagatcagcctggacaacgtggcaaaaccctgtctctacaaaataaaaaacaaaattattagctggggtgtgatgacaccggcttgtggtcccagctactcaggaggctgaggtggaaggatcacttgagcccaggaggtcgaggttgcagtgagccatgattgcgcccctgcactctagcctgggcaacagagaccctgtctctaaacaaaaaaaaaaaacaccaaccaaccaaaaaaacaaaacaagacaaaacaaaaaaacaccgccagggcggtcgggcatggtggctcacgcctgtaatcccagcactttgggaggccgaggcgggtggatcacgaggtcagaagatcgagaccatcctggctaacatggtgaaaccccgtttctactaaaaatacaaaaacagccaggcgtggtggcgggcgcctgtagtcccagctactcaggaggctgaggccagagaatggcgtgaacccaggaagcagagcttgcagtgagccaagatcgtgccactgcactccagcctgggcgacagagcgagactccatctcaaaaaaaaaaaaaaaacaccaaggcatggggagggaaggtgaaggctgtactgcggtgtggagcacgaaggcccgcagggcaggggcgaggctggccctccgcaggtcccatgtggccgggcctcagggcgtggtcttgggggtggtggtcctggccgagatgggaggggctacctgtaaggatggactgtgggcgattcgcttagggatgatggtggtggtagtcttggacgccatccccgacaatgtgcgtgttttcagctgctggccacctggctcagggccgttggaggactggctgccgctggccgcaagggtcctcttggcacctgtgggggctggcggggcacagggggtgtgggcacagggcgagtggctgcccatcaccacgtggcggagcaccaggcagccgcggccgctcagcgccagcagcacgtgcatctccgcgtgcagggggccgggccagggtgaggggctggggctgcgcaatggcatcaggctctagctgccttcaggcaagtccatcgaggcagaggacacaggtcaggctgcggaggccgctgaggacacgtcaccggtggggtggtccaggcctctgccacgtgttctgaccccaagcccaaggcgtcgatgtctgagggaaaggccctggctcccggacagaggaccgaagggtctcgggtgcccccacctgctcattggctttgccctgccctgcggcctctgtgttctgccttgccctttgatgaagtcacaaaccagagggaggaggccaggcctgcaggggctgcttcggagggctggccacgcgggcagctgcaacctgggcatgtacgtctgtgtggcaggggggcttctggactgggggctcggcaccgacccaggaaggggagctgtgagcagggacatctggccctagtctcagagcaacatccctcgaaatgccatctggccctggaaggtgcaagggaggcaggatgagtctgctcatgctaccgcgggccgcccagcaaggaagcaggctgcccgccaggctggcacgcgcctcttgcagtggagggtttgctcttcaggaacggacagagaacctccagactccctcggctgcacgctgggggcgagcccaggcagccacaggagtcctccaagccagatgagcccgccctgcggcactgccagcacttgggacgccagactcccttcaggcggcgggccccaagggcactgcgacagctcagcacccaccacagatcagcaacaggacaacccgagcgcggagacacagacgggaagcgtgtggggtcctgggataggcccaactcaatgatttcccctccctggggctaaggtctcagccgtgagggggctctggggaggggaggtcagagtagcctggagagctctccctaaggagggccgtgggatccatgggatctgcaggggaatcgccggggctggccctaaggctctccagccagcgccagggaggcaggggctccaaaccagcaggctgctcagggtggtcctcggacagcagccatgccctcccagggagcttgccagacacacagacctttcccagcctccagaccagaacctgcattttttaggagctttctgggggaccctcatctgtgacctgcctccagggatactttctcgctctacagacaccactgatgtgaagacgcaggagacaggacaaccccccgtgaagggtcctgtccacccaccactgaggcctggcccgactttctacaagaccctgctgggggggaagtgcccctcggagtaaaggaaatacagccccactcctgggaagacagcactcatttccatcagaggccacgccccccactcacacgccaggagaaagccacacctgcagaagcctgctccccacccaatgccaggtaccccgacatggctccccattccctggaaccacaggctcaggccctggttcagcccagtccccagcaggctgttggactcctagtaaccccggagctgggtcagggaaggaaggtgctgggccaggcctcctgcacccctcaacagtccccatttcacagacaggcaggctgagggccccagggagggggcccaaagtcatcccatgagcaagcaccatgtggttcaggtgagctcagagacctcagggtgccacctctcctgcccacatgcccacggccccccggcacaggccccctgggccaggactcacctgcagccaggcgggggttggggatgtgggcgatcctcctcttctcgccaggggcggaaatgtggacggagggcgacttctctgccagcctggcgggggcctgcagcaagctcgccgatgccctctgcgcctgctgggcccgcaggtagcacacctcctgcgccgtcgggggccgggccgggggcaccgcgggacccctcctcgggggctccacctgcgtcaccacaaatgctaaggcctggcagcacagcgggggcacctggagcaggcgaccccgggcaggcttgggagagggtggctggagctcgggggccggaggcaccacctccctggctgccttctgagctgctgggcacactggggggaagcagcagggggcagtggtcctcaatgccatgtggctccaggctcccccactcccagtgtctcccggtgcccaggctatgtcctcagccctgataaggcacgggtgggcgggactaccccgattacactggcactccaatccaatcccactacgcctaatcttcctcaaagcccctcctctggggaggctctgggactggagcaactgggactctcctggctgctgaccccggagccaggctctctgcttgtcctgcactacctcgccacgtctgcacaggggcctgacaagcgctactgtctccgggctacagaggacactggagctcagagctggacaaccggcccaggcccaggccgcacacggcgcagcaggccgtctgccgcactctgggggaggtcaccctggggctgctgacctgctctgtccctcgccccagcaccgtggcaatctaacaggaaggggcagggccagctccctctggaactcgggcagcgtcaaagataaggtgtcttcaaaaagctcatggaaaacgtgcgttgtgacgaaacttgcatggctttcaagtttttttgccccaaaataaactgatactaacttgtcataacatgtctgaaccagacggagtttgaggcactaaaaaaaagtaagacatcagttagaacagagccccagtcagagcaacaggagttctgctaaaattgaagcaaatgttaagcatcaaatttatggtaaaacttgggtggaagaacgaatggggaaatcactgatgctttacaaaaagcgtcacagatttacaggaacaatgtcccaaagaaatcagaagtttatgaatggataactcattttatgtatttatctttttgagacagagtcttgccttgtcgcccaggctggagcgcaatggcacgatcttggctcattgaatcctccacctcccgggttcaagcaattctcctgcctcagcctcccgagtagctgggattacaggtgcgtgccaccgcgcccagctaatattttgtatctttagtagagacggggtttcaccatgttggccaggctggtctcgaactcctgacctcgtgatctgcccacctctgggcgcagtgcctcatgcttgtaatcccagcattttgggaggccgaggtaggcagatcacgagaccagtctggccaacatggtgaaaccccgtctctactaaagatacaaaaattagcctggtgtggtggtgggcacctgtaatcccaggtactcgggaggctgaagcaggaaaatcacttaagcccgggaggcggaagttgcagtgagcagagatcgtgccactgcactccagcctgggtaacagagcgagactccgtctcaaaaaaaaaaaaaaaaaaaaaaacaaccaaaaaacaaacaaacagaaaacagagggatgaagctgggagcagtggctcacgcctgtaatcccaacgctgggaagccgaggcaggaggatcacttgaggtcaggagttggaagaccagcctgggtgacaaagcaagaccccctttttttataattttttttttttgagacagagtcttgctctatcacccaggctggagtgcagtggtgcaatcttggctcactgtaacctctgcctcctgagttcaagcgattctcctgcctcagcctctctagtagctggtattacaggcacccatcaccatgcccagctaatttttgtatttttagtacagatggggttttgccatgctggccaggctggtctcgaactcctggcctcaggtgatccacccgccttggcctcccaaagtgctgggattacaggcgtgagccaccaaaccaggccaacctcgtctttaaaaaaaaaaaaaaaaaaggctcctgctggcctggcctctgcggaccttacctcctggccttgcttggaaaggtgggagatcctcctcttctgcccggggaacagagtggtcagacccgaaagccccttctcctcactcttctcttccttggggggctaagacacatgtccgtccgtcagcacaggtctgccctcgctgccaacaccaacacaccccaacctcaaactgcccccggcaagtggggaatggaacagtccagcccccaggcacagcagctgagggctcagggccaacagtccctgggctttgtgtgggtgcagtcggaggggtgggcaggtgtcacacgttctgcagatgcccaaggctacctctcctgggcacccagggccccagcttggagaccccagggctgcagaatgaaagcacactgggaaagcgaggccaccttgggccgaaccagctgctgcgggctgagcacttgggctcagtctgtgtggagtgagctccccctggtggccaatttggggacacggggccaggagacccaggggtccagggctggcccaggagagcaagagctcgccacgctgggagtagggaggagggaggggaggagaaaggagccggaggggatgaggaggaggcaaggagaggagacagaggagctggaagagaagagacagagatgggggaagggaggaggggagaagagagggggaagggaggaaaggggaggcgaggggagaggggctagaagggtgtgccggaggtggattcccctgaggtgggtgggtgggccaatatccccctgccagtcagtgggaacagaccgtgtgcacgtggccacagaagcctggctggtggccacgggccagtgacctctgggtgggtgaggggcaacaggagcaacagggctgcccgggtgctcctgagctcctgagatttcaacgggctcagggaccagcactgaggagctgcctccaccccgtgcctccgagccaactggaaaccactccagatagaaggtctctcaccaggccctcggctctgcctctgcccgagcccagccccagcacccgcgcgcctcacctgccgggccagccggcctctgtcctccgtcttgacgctggtggactcgttgaagatccgcaggcactcctccatggggtcggagtcaaagtccacctccttctccagggccgagtagtccacatccgcccccgcgctggaggtggaggaggaggaggaggaggaggaggatggggcgggggaggggggcggggaggccttgagccgcttgggcggcccctgcgcctccgggaagcccaggctggagtctgagtcggagtctgagtccgagctgaggctggggagggcagagggccacacgctcggcacccctggccctgcggcctcgtcctcactctcgtccccaaagaggtcggcgtggctcagggcccgcttcttcagcttgggggcgtcctgggaggcgccctcgtctagtgagcgggctttccgctccactagcttccccgacggggccttggtgctcttcctgtcgggcagctggagggggcggggtgggcctctgccggccgccggtcgggagtccccgcttgtggggctcggccgccgcgctggccggtcaggcctccctttccctgaggtggccacaggagtggccgaagatggcttcttcttggtcccttccggccgctctgccttgcgccgggggctgctggcctgcgggcccttcttgtccgcacggggcttctccacaggccgccctcggcccttgtccttggtcttgtccttcccctgggccccgtctttgcagctgggggcaggtggggccccggtttttttcttcttgggttttccctccttggggcagcccccatcctgtgaggactggacctgggctggggaggcgggcttggctgggggcggctggaggtcccccacgtcgcactgcacggccgtctccttggtctcccgcaggccgcccccctcggcctccaggccctctttggagggtggctgcccggtggccttgatctcagggtcggccctggctttgggggtgctggccgtggtgggctcgttacctgggaccgtggcggcctcatcttctgagtctgagaaccttgcatcgcaactgccaaaggggtcacagagcttcttgggagcaggtgtgtagggctcactgccgcgggagccccggggccgcttggcggcccgctcatcccgggagctggccctgctgaggtgccgggccgagtagttggagagagggtcatactccaggtctgtgggtggcctggagttgtccaccacgtacttgccactgggaacggggcggctgtgccgccggggctggctcacagccttggggacgtattccagggcaccgccaccccctccacctctgccctgacccctgtccagggacgccagcgagtacttgctgcccggctcggcaggggcggccagtggggtgggctggtagccggcatcagggcttaataggccgtggctgccggggctgtagtcgaaggccagtgggaaggcatcctcgtccgggcccacagtggggctggcgttggggccgcggggcgccagggcgggggcctcggcggagcggtgctcacgggtcgtctccagcagctcccggtagcgccgctgctccagctccacctcactgcgcacggcctcgatggcctggttgaccagctccaactccagcacatccgggcgcggctcctcccccaggcccagggtgccattctccctctgcgcggggggcttgggcagctcagggttgtaggggtcgtaacccagccctgaagggaacagagagcacagctgtgaccagcctgccggagaggagcccgcagcatgggggcggccccggtctcaaactgcagggaagggaagagacctgcctccgaaacccaccacgcactggcgcccgccaaggctctggggtgcccagctgggtacaggccatggcgccatctcaggccctgtgccgggccccgccttgccctgaccaatgggcgctggatgggcctgggctgcgtgacacacagctccctgggtactggaggctccctcacacggctcatgaaatgcgcacaatgaccatggtggggtggacactcgacaggctggaactccccggggcaggcgggtgtggagctcccagcattcagggtgccgggctgaggcaggactgggctgggccgacaaccacagcctgacggtggacacaggagagcccttcctcagccaacacggccccacccagccagcagtgtgcccgcggtgtggcggaggtgtgccagcagtgtgccagcggtggtgtggtggcggtgtgcctgcggtgatgtggctgagcagggccgggggatggggacatgcccagttgatgggccaccctgcaaaatccacaggaagattttttttttttgagacagtctctctgctgcccaagctggagtatagtggtgcgatcttggctcaccgcagcctctatctcccgagttcaagcaaacctcctgcctcagccccccaagtagctgggattacaggcgtgcgccatcacacccagctaatttttgtatttttagtagagatggggtttcaccatgttggccagtctcgaactcctgacctcaagtgatccactgcacctggcctactttaaattaattttttaatttcaaaactttttgtagctgggcgcggtggcgcacgcctgtaatcccaacattttgggaggccaaggcgggcggatcacctgaggtcgggagttcaagaccagccagaccgacatggagaaaccccgtctctactaaaaatacaaaattagccgggcgtggtggcgcatgcctgtaatcccagctactcaggaggctgaggcaggagaatcgcttgaacctgggaggcagaggtttcggtgagccgagatcacaccattgcactccagcctgcgcgacaagagtgaaaccccgtctcaacaaaaaaaaatttgtagaggtggagtctcaccatattggccaggctggctttgaactcgtagactcaagcaatcctcccacctcagcctccaagatagctgggactatagcccaagctgctgtgcctggcttaaagcacacggctgaaatgtcttcccggggggcagctgggaacatgagactcgcatgttatttacgtggttccagaacatagtgtagcagaccctcacaacctcaatgccaccaacgtcagcacagaagtcagaaccacagaagcctcccgtggggacaggccgaaggagtctaaagaaaacatgagcaagtggagcccagtattccagcgaagcaataaaaaccaagttcaaatatttactccagaaacttggaagttgaccattagaaattctactgagcacggccaggcacagtggctcacgccgatcatctcagcactttgggaggctgaggcgggaggatactgcttgagctcaggagtttaagaccagcctggatgacacagatcccatctcttaaaaaaatacttaaaaataagctgagcatggtgatgcacacctgtgctcctagctatgtgggaggctaaagtgggagaatcacttgagcccaggggcttgaggctgcagcgagccaggattgtgcctctgcactctggcctggacaacaaaacaagaccccagctcttaaaaaaataaaataaagttccactgaatgtaattccgtaacatctctaaaggtctctaaaggtcaacaggtctgatcctctggagttggcaggaaatggcgccaaagacgtctgcgtcctaattcctggaacctgtagatggtatatccccttagatggcaaatggggctctagatggggtgaaatctcccttgcccgtcactgagggggccatggacaggccgagatcttgcagagcagtttcgcaaccatcccatgcagcttcaacaccaccaccttcagactcggaatcctcagaacccgtgccacagacagaccgcacagggcaggtacagatgcgtctggtgcagccttcactgcaaaaacacaacaataaataacgcaggagatgacctagaagccgaaacgcaggtcacctgtggttaagggggaggcgtgcgccctggagggacctccaagtcacactgctatggggaagaagaggggcaaggaatgttgcacactctcacctttgaaaagcagctccacaaacccagtgagatcagattccaacaaaggcgcacgggcccacaccaagcccgcagtcccatggggtacagcaaatgcaatctggccttcatttatgctgcacccaacaccaactgcccaagagggacgtgaatgctgacacacatccccgacaggctgataaggagctgtgacaccatgtagcaaaaggcaacagccccatgggaacctgcccgcaccaagacgccacttggctctgacttgattctgactgaacgtgcagcttgtctgaaggtcgggcctcaggtgtgtttcttccactcagaaaacctgcctgcccttcggcccacctggagatcgacccccacagcgtgctaagacttccgtgcagagaaatggctggacgcagccaaggggaggcaggcacaagacctcccactgtgggcgacgcagagaacagcaacagaactggaggcttcccctatggcccccacccacaccccctcaagccccagcaggcataagaaagaaatggctggtttcggccggttgtggtggctcacacctgtaatcccagcactttgggaggctgaggcgggcggatcacctgaggtcaggagttcgagaccagcctgaccaacaaggaaaaaccccatctctactaaaaatacaaaaaaattacccagccgtggtgacccatgcctgtaatcccagctactcgggaggctgaggcaagagaatcgcttgaacctgggaggcggaagttgcagtgagccaagattgagccattgcactctatcctgggcaacaagagcaaaactccatctcaaaaaaaaaaaaaaaaaaaaaagaaagaaaaagaaaaagaaaaaaagaaatggctggtttcccaagctgctcccccgagacacacccaccagcagaacaaaagcctccccaggtaagtccccatcctaatccctgggacctgtggccaggccacctcactcagccaatagactgcaggtgcgacttgaacaaaggaccctgagggtgggtgaacatcttgcattatccgggaacccagtgtcctcacagggtcctttaaagagggaggcaggagggtgagagtcagagagactggaaaaggctgtgctgtgggtttgaaggggaggaaggcgccctgagccgagggatgcaggtgcctccagatgctgggaaaggcgggcactgactctccccggaagccttcgggaggcccagtcctgcccacagcttgacttgagcccagcgaggctgactttggacttcccagcccagcgctgagagagagtgtgctgctttaaggcccacggggacgaatgcagcctcaccgggtgatgaaagtgcagtggaaaacagctgcccgctgcctgtacctgcgaaggcggaaggcccctcctgttcccgggaaccctgcagggacagcgggaggccgggacccggaggctgcagaggaggtgggaggaggcctggtcacgggcagctgccgcctttcccttgaaatcacagcagtgttgtgcccatctttaaaattacatttagggaccaggcacggtggctcacgcctgtcatcccagcacggtggctcacgcctgtcatcccaggcacggtggctcacgcctgtcatcccagcactttgggagaccaaggcgggcagatcaccagctcaggagttcaagaccatcctggccaacatggtgaaaccccatctctactaaaaatacaaaattagccaggcatgggggcgtgcacctgtaatcccagctactgaggaggctgaggcaggagaatcgcttgaacccaggaggcagaggttgcagtgagccaagatcacaccactacactccagcctggcgacagagcaagactctgtctcaaaaaaaaaaaaaaaaaaaaaaattacacttagtgccaggctcagtggctcacgcctgtaatcccagcactttggaaggccaagatgagcagactgcttgagttcaagaccagcctaggcaacacggcgagaccccgtctctacaaaaaaatacaaaaaatgagctgggtgtgatggttgcatgcctgtggtcccagctacttggaaggctgaggtgggaggatctcttgagcctaagaggtcaaggcttcaatgagctgtgatcacaccaccgcattccagcctgggcaacagagcaagatcctgtctctaaaacaaataaaattaagtagcatttagacaagaggaaggatccgtgtgtctgttttggaccactcggaactccgcgggactgtgtggagggccacgaggtacgggcaggcaggggaacatcacacagaagccacaggttcttctttgcctgtgccaggctacagccaaggcatttccaggaaacgtcaccccatgtgcccagcaggcgcagaggggcccattctggcaccatctcacagccaaggaccctgggagtcagcgagggcacccaactaggatcagcaactgtggctgccagttcctctgtgcggggagggacagctgccaggccaggaggatgctcccggcagggaaacggccggctggggctgggtgtcagcccccacccagggggagggctgcggaggccagcagcagctcaagggcgccctcccggcccacttcactgggggaggctccggctcctccctgacccagccggctgcagagcacgccaccctgccacccgcctggtgaacagggcaactagtgccagccctcccccagccccggaagcccggctgcccagtgacgtggaggggccaggccaaggccactgtggcgtgagctgcagagattcatgaaggggaggtgacagagcacaattactgaggaggagcaaggccaggtcagggagacactggtctcccctcccaaggctccagctaacggggatgcagagaggaggaagagcccgcctaacgggaaggctctcctccccaggcaggggtgggcagcagtgagactgggccccaggagggcaggcgggggtggaggggactgaggcatctctaaggggctaaggataagggactccactcaggggcttccacctccttgtcctggaccccagggctctaagacacagcctgcaagatcaacccagcccaggggagccaagagtcacaggcaatacacacaccagccagcagacacccgcgagcccttcccaaaggaaggaaattcagacctctggacattgtggactctgaaaggagagaccatttccccaaaaggtgcttttggaaggtcttggaaggaatagcacctgcctcccaggagtggagccaggcccccaagcagagcgcaggacaggtgataagggtccaatctgggggacgtgggcttgtctttctaactggaagcctgtgtgagtacttgttttgttgttttgtggagacaggcattgcccaggctggagtgcagtggtaccatgatggctcgctgaagctttgcctccccggctccagcgatcctcccgcctcagcctcgcaagtagctgggaccacctgcgtgcaccaccacatccagctaattcttttctttttttggtagagacgggggtctcgctgtaattgcccaggctggtctcaaacttctaagctcaagcggtcttctcgcctcggcctcccaaagcactgcttgtcttttaagggctgtgaaacctgccccagcctttagccaacagatgggaaagagcaggggcacctggaggccggagggcacactctgcagagggggtttcagcattttcactcccgggtggaggctgctaccacctccacaaagactgcaccaaaaagaaagcaggcatgctaggcgggtccgagaagactgagatcaggatctgcaccacggcctctcctccctgtggtcactgggctcccccaccctgcagcctgtgacccactggtgctggaaggcagcatcctggcctgggcgctccagccaggtctggaagtttcacacaggaagttgcctggggctcggccatggctgcctgcagctcagaacagggggtacggcgtgctgagcccctgaaaggtcacctgaagctggtacacaccactgcctccctggacctccctgtcccaccatgcctcagagggttggatctgggtacctgtcaggactggaaaggccccagggtggcatgtgcatgctgctaggtgccctgggagcccacccagggggtcacatctaaaggccgagtttgggccaggcgtggtggctcacacttgtaatgctagcactttgggaggcggaggcgggaggatcaccgaggtcaggagttcgaaaccagcctggccaacatggtgaaactccacctctactaaaaaatacaaaaaaaaattagccaggcctggtggcaggcgcctgtaatcccagctagtcgggaagctgaggcaggagaatcacctaaacctgggaagtggaggttgcagtgagccgagaacgcaccactgcactccaacctgggcgacagagctatacatgcatacacacatacatacatacatacacacacacatacataaatgaatgccgactctggaagtaggaggggcccgtccaggccccgtcccacggctgggaattactttggataggagcaggtgggctccttcctggatgtggcccaggtcagtctgtttctgggaaacatggtgaattggctgacaggaaaagcctacctccagaggcctgggagctgccccttcctccctgcttcaccccaaggccaggactgggaggtaccacccagccccagtggtcctgagaggccacaacgcctggctggctatcttccccagcctctccagccagggctcagcccagggcaacgcagcccagccttgtcccggcctaggagagagcccactccctacaccacccatcctgaccgcatctcctgagaccagtgccctgcagccccgggacgggctggatgacaaagatgatatttcttcccagggttctaggtgtggggcctgggaccagcactatctgcccaaggccatctcctggcccccaaaccttcccttggcccagaaacccctcaccctgggcatccactctcctctctgctcccactgcccccgccccaccacactcaatccacccacacagctgtcctgtccccagcaatggggagaacctggcatgagctccaaccccacacggagactgaaaggcagcaaaaatgacaagatcatggagcacgaagatcccaacctgaacttccagaacgttctctagtgagacccgtccaaactcctgtcttctctcagtcagcccatttcaaagatgaggacacccagtgccagcgagagccggcagctcctagccccacaaggagccccaggcccctcccacccagacggggagactcagtggctctaaagaacccggcaggctggctggacacgatggctcatgcctgtaatcccagcactgtaggaggccgagacgggtggatcacctgaggtcaggagttcgagaccagcctggacaataaggtaaaaccccgtctctactaagaaaacacaaattagccgggcgtggcggcaggcgcctatagtcccagctacttgggaggctgagacaggagaatcacttgaacccgggaggcggagactgcggtgagccaagattacgccatcgcactgcagcctgggcaacagagcaagactgtctcaaaaaaaaaaaaaaaaaaaaaaaagaacccggcaggcccagcccctgctccggacaccgttcggtgggcccgcagggctctcaacgcaaccaggcatcagcaggactggcccctccagcccaggcagtgggccccgcatgctggcccagaacaggccaggcagagaccccagatggaaacagacagtccctcccgcctggggcttagctggacaaaaaagataagcctgacactgcggcatgagataagcaagactacccccaacctagcccctgggggagccatctgggcggcctgaggctttgaaggtggagacagaagaggacattcccaaaacagccacagcggcagagaaggcacggggctgaccctcgcgaagcgcaaggcaggggctggttgtgtccacgggagcgcccatcccataacagaccctctgggaagaggggtctggaggacagcacccctgaagtccacctcctgcggacggcagagtaaccataaggtccccacaaatggccatacgtccactctgggggtccctgctcctggggcctcccctccaaccctcacagtgggacgtcctccagccccatccttggacatgcgggcgcccggggccctccatgcacagcccactggacagataggaacccgctgctcagaggcaaagggaccagcactctgcacccagaggaggtcccacagctcctagaccacacggggcagaaacagggtcacctggagagggcttcgaggaaaagtccagccagtgccgggggcctggacctccaccacccagcagcttccaataccctctctgaaatccaaggtggcccagctctgccccaccccccacaccagactccacccaggtctcagagcttgctgtggaggctgggctgtgcctgcagcagcggcacctggggtctaccccactgcccccagggttctcctcgacccccagggctgcgatccgagcctcccctctgctccaaggcaccgccctccccacctcgacagcgcagtgtgcagtgccaggaccgcccagcaggtggagccacacggcagggtccaggggagaaaaagaaaaaggtcccggcctgaccggggaccaccagctctgctctctggggcgtcctgggcatttattcacctcatggggcggccgtccccacatgccatgactggacgcgctgctgtcccaaggcttacagctcgaggctaggggacagggacggtaaccaggacagaggtcactgcctttcaaaacaatgtagaaacaggctgggcgcagtagctcacggctctaatccccgcgctctgggaggctgagcccaaggccgaggcaggtggatgatttgaggtgaggagtttgagaccagcctggccaacatggggaaaccccgtccctactaaaactacaaaaaattagccgggtgtgggggtgcctataaccccagctactcaggaggctgaggcaggagaattgcttgaacccggaaggtggagtctgcagtgagctgagatggcgccaccgcactccagcctgggcaacaagaacgaaactccatctcaaaaaaaaaaaaaaaaaccagctgggcgtggtggctcacacctgtaatcccagcactttggaaagtcgaagcgggcggatcacctgaggttgggagttcgagaccagcctgagcaacatgcagaaatcctgtctctacttaaaaaaatacaaaattagccagctgtggtggcacatgcctgtaatcccaggtaatcccatgcctgggcgcagtagctcacgcctgtaatcccagctactcgggaggctgaggcaggagaatcgtttgaactcgggaggcggacgttgcggtgagccgagatcgtgacattgctctccagcctgggtgacagggcgagactccttttcaaaaaaaaaaaaaaactgaaacagaagggtacaaatggcaaaggacaagaaccggcagggaggagccagcgggaccttctccccctatgcctctccatccctgccaagagcccaccttggctgtgagccactttcatggtccacacagagtaagttaagagtccagctctcagccgggcacggtagctcacgcctgtaaccccagcacttgggaggacaaggctggtggatctcttgagcccaggagttcgagaccagcctgggcaacatggtgaaaccctgtgtctactaaaaatacaaaaatcagcagctgggcacggtggctcacgcctataatcccagcacttcggaaagctgaggcgggcggactgccttgagctcaggagtttgagaccagcctgggcaacacggtgaaactctgtctctactaaaatacaaaaaattagctgggcgtggcggcgtgctcctgtaatcccagctactcgggaggctgaggcaaaagtatcacttgaacccagcagcggaagttgcagtgagccaagatcacgccactgcactccagccagggcgacagagcgagactctatctccaaaaaaaaaaaaaaagagtccagctctcagctcctcctcatcccagggccttttctgtccccaaaggacatttcccagtgggtgtttctgggactcctgtgctccccgtcaggcacagaggactaaaagcatccaggagccctgcagcctcttccaggggctcacagagaagctggagtgggcacctccacggggcgctgcccctcagccaggggttcacaggctgttcctaggatgggtgccgtggcgcctaaggaggaacccacacaccagggtgactgcaagcacaagctgtttttgttacttggtgacctgtgtgcagatgctggggggacggggtgctggctggcaatgtgggccgaccccggccccatcattcattcctccagcacatgttctctgaatacctgcccaggacctcagagagggcacgcagcctgcagggcacaaagggcagggccctccctctctgtctcatccacttccccaaagtccacttcctccaggcagccctccgaagtcctccctgcagaagcagcagtgcctggcatagtgcctgggatacagaggtggaaggcatggtggagccctcacctcactccacctcctcggccgtggtgcacggggcggtggccaactcaggactgcgcaggcccacttccatggcttccagatcctgtctccctagggcctgctcctgaggcagtgctggctcccttttggtctctgagggcctctgagccactgtgagaggaggagggaggggtctcagaaaaatggactgtgacccgtgaccgttaacagggtggggatggacctgtcgccaggacaaatggacaggctgggaagccacagggcggggatacgcctggagtgcacgccaggcccacacccccaagcacacgctctctgccaccttcctggccctgccccctgccaggctcttctgagcaccccagcgtcgacggagctggcccagggcaggtgtctgcagagatctgaggaaggaaggaaagtgggaaggggaaggaaacactgacccagaggcacgggcccctccacacctgcagcacaccgactctccagacatgagtctctgtgggaacaggaagagactccagaaagctgagaatcgcagactgcccaaccgcaggagcgctcccaggctggggacagatgagacagcatatcaacagtgagccccatcggcggcaagctcccaagcagccccaagcccagagcaggagaacatcccaggctttcctcgagctgtctccatccccagagcccacagccctaatcccacttccagccacaggcaaactcctattcatcctccaaaacccagcccagtaatcctgtgtttggaaacactcgccccacccccctgcaactctgagtgacacccgggcccgccccacgtcacccctccactccctgcaactccaagtgacagctgccctgtctcctggacccgggcccaccccacatcaccccctccgcttctgcttcccgagtcccctcagcctggcgccacagacactgagtctagatggacccagacagggccttggagggcaccaggaccagctcctggctttacagagaacactgaagtcctgtggtgtgtgtgtccaggctcagcccacagctcgtcccgagtcctcccccaaccactcctttcctgaggccggaagcaggggcaggtcccagaaccccgggctccaggcacgcagcctgtcatgggacgggaggcgctccgtcctcgcagccgttcccaaaaacctctcggagcctaagggagggatcgccccgaaacagccagtgcacatgcggctcctccaagggtcccagaggacttggctgttagaggaggaagaggaatggcaactcgagaggtccccgtgaggctcagggacccccaggattgccctgacagtctcccttctaccctgtttattttcttttcaggtttttgctttttgttctgcagcagatcataccaacagaatctacccactgcgcggacagcgtaaggaacaagccacggccgggcgcacccagcgctccccggaaacctgcctgctcctctctagggattgctttgcagaagggattctgagggtggggaggagggcggaggaggacagagttttctcgtcaaagtgaggcctgctacagcacagcccgcacgacgcttcccgtcacactcagatgccacgaccccatcgtgcagaagagctcgcagaggccgagggaggttcaggaggcaacaggctcaagggggtaacgcccagcaggaggaggccggggccttcctagcgagctctgccccacagaaagccaagcaagacgccttcattccggggtacggtctccagagggacagaggccggccactggcacctgaacctccagtctgcagtccctggaggagacggtaaagctgcacagggctctggggggagcgctctggggagcggctcaggcactgcaagagtccccggaacccctcccagcaggcacgcttgtccccgctgaccccagccccagcgagctgctctgcctctcccatctcaggctctgggggcagggacggtgcttctcagggtctctgcctctccctacaggcagagcgccagctcagccatccctctcgaaaacacaaaaacaggcccagcacagtggctcacgcttgtaatcccagcactttgggaggctgaggcgggtggatcacttgaggccaggagttcgagaccagcctggccaacatggtgaaaccccatctctactaaaaatacaaaaattagccaggcgtggtagcaggtgcctgtaatcccagctacctgggacactgaggcagaagaatcacttgaatccaggaggcggaggttacaggaagctaagatggagccactgcactccaacagcctagacgacagagccagattccgttgcaaaaaaaaaaaaaaaaagcagcagcagcaaagaaaacacaaaaacagcaggcggggccgccagaccggcatcctcatcctcaggactactgccccaagctagatctctgtctgtggggttgtccccagcactgaagggtgctgagcagtgcccctggcctctgccctctctgtgcctgcacccccaaactggcaaccaaaacatctccagacatctcctaacattcccaaggtgcagaaccgccctgtcgggatcagtcactgctctactgaagacctaagcaaagaatcctaaaatatgaataccaaaaccagcctcgactggcacggcccacgcctggaggcagctccgggcccagcagccaggttttcaaagctgcccaggcgctccggaagtcaggtgaggacctcagaaccttgggaaaagcccccccaaaaaaacagaatccaacctcatctgtgaggcagggtcccagccatggctcaagcacagcaagcccgggacctctggtgtggagtctggaggaggcccggcaagcggcctggtgccggactcggcaaaggaagccacacttctcctctggctcttccgtattctctgatgtttctaaaacaaacatttccccaggccagaaaatagtaccttcaaaagtaaagcacccagagacccgtggcaacacggacaggcccccaggccctgggaacccagcgcttttcccatcgccatccacctgggggagagctgccagcacaatcctgccagcatctgcaagaaggcggctgctctggaaaccccaggcccctttcctctaaccccctccacacaggaacatcaagagtcacggggcagcagagccacccactctgtggtaggagtgtgggggagggctcctcctcctcgaggccagggcaaagcttcaaccccccgcccggagggtcccagctccccgggcccagagccgcagctgggcgaagcttcaacccccagcccggagggtcccagctccccgggcccagagccgcagctgggcaaagcttcaaccccccgcccggagggtcccagctccccagggcccagagccacagctgggcaaagcttcaaccccccgcccggagggtcccagctccccagggcccagagccgcagctggactcgcaggctcgccggcgagggctgaaaaagaaacggcctcagcaccaccgctggttgtcaccactggggtcagggaagcccagggacgctgctcaacatcctacaacgcaaaggacagcccaccagacgacaatctggcccccagtgtccctagcaccaaccgtccctccagcaagctccatagctgccactccaggccaggcaggcaggcggccccggtggcccgattgcccacctgccacccgctggtaaaatcacccccgggtcctcatacgccctggtcaggcctggggaaccaaaagacaatactgctggctgcgggggttctcccctagagtccattccttcctggacgcggctcactgaggatgaaaagtcggaccgaggagagcacacactgtcacgtctctgaaggtgacacaggtggtcagacggtgccttcactgccccacggaaagccggctgtctcccatccaccaggaggaggcagcacaggacgcagccagcgggagctcctgaccctcctgagaggccagaggaaatgaaggcaagccatcctctgcagcgaggcgccattcttggcctccttctcccttctcgcctgactcggggcctcagagtttccgaggagagctggcaagccctaacagatcagtaggatcccagggctcacctgcctagcaggggtatgggaggctgtcaccgacaccggagagccaggcctgcttcaggcccatccttggaaggtttcaagttcccttctgtgcccagcccacagaggctggcagcaaaaacggcagaggaggcaggcagggccccggcccacccacatccaacccagcactgccagttaccagccacgcgtacacaggtgagcagcctcccggcgctgggcctcagtttcctcatctgtaaactgggaagagccactcccactgctgtttgggggtcacaggcagagtccgcccagtactgctgtggtagtggccaagtcaagaggtagggaccccagagcccatgtgaggggccacatctgaagagccagaaggaggaggacccctgcctgacccgactctgctagaaggctcaggagatactgggtacatggtggctgggcttcaggagatattgggtacacggtgggtgggcttcagtagatactgggtacacagtgggtgggcttcagggctccccatgtacctggggctgctccctgagcgcctctaccccaggactcctgccctctacagatgcagttctggagagtcgcctggagccccagctgggacgccgccaacagccccacccagaaccactggcaccgggctgccagatcctgaacccgactgcgggatccccgagggcaggagctgtgcgccccgcacacacgtctgccgctcactttgcagtataggatggccccttccccaggcctgggactgtcctgctggggcctgagtcagcctgtggcgcagcactagcatcccctcaacgtggtgccctcagcctctgcctccctcaggagaagcatcatctgggagcacgttcctgccggagctgtgaagccctgagctggggcccaccgcacctctggagagccctggactttcctgcaatcctccccggaagggttccctctcctggaagacagtgtcctgcctctcagtaggacacagactccctgagacaccacagggagtgcggggcagtgggcagaggcctgggttctgaggtcagatgggaggaaggtgggatctagccctgcccactccacatagacaaccgaggcccctcacctaccaccaggctgcagccaaggcccaggcagcagagagcggccactggggggatagtaacgctcattcccaactcacaaggctgggatagaacgtgcccctctaggccggggatgcacatccctgcgtcccagggctacacggtgcccgccgtaagggctgctggaccatccctccaagccaccctgggcaggtccagccggctctgaaatggctgtgcagcccagcgcggtgcttcacgcctgtcatcccagcacttcaggaggctgaggagagaggatcgcttgagtccaggagctcaagaccagcatgggcaacaaagtgagaccccgtctcggcaaaaattttaaacattagcgaggtgtgatgtcacatgcctgtggtctcagctagtcaggaggctgagccaggtggatcccttgagtccaggaggtcgaggctgcagtaagctgtgatcgcaccactgcactccagcctgggtgataaagtgagaccctgtctcaaaaattaattcattaaataaaatggctgagcaggtccagggataagagcccagaaggaaacctgagtccttcagcagtgctgctcaaggtcgccaatgacccgctgagcctgtgacccagggcccaggagcaccagccaccttcctgttcccgtcgcagctccgccaagcctcccaaccctgcctgccttggtgccctcatcagatgccctctccttctcccagaggccctggaggctccagccctgccctggccaggtggtagtatgggcaaaacacgttcctcgataagcctccgtttccccaccggcagcaaatagctcacagggtcaccatgcagcgcgtgtccagcacagagcatggccccacaggtgctccagggctagctgagggcttttcacctgaacctctgtccactctcaatcctgggaggccagcgttcctgtctatctcctctctggaggccgctgccctgtgcaccctaaaatccccttgagaagacatggcaaaggctagatcacgccagcctcttcaaatctcataggaaactgggtgtgtgtaaatctggaggtgtggacatgggacatgcatccccccctgtcctcagagggcagcctgatgaacatgtcacggaggcggaaacagagggtcagagaaacctcaccgcaaggaagatggatcctgccttctgcggggggaggcagtcttctaccagacagtaacaagaagccctaccaccccaccagagatgggaaaaggagttcattctcaccagcaaaagggaaatgcagacacgccatggtaagaggcaggcagctgcctttttcccataggaacggggggcagacaggaagacgacatcaccaaagggaccctcaaaaataagcctttgggaaacaaatgagccatttgggatgcagacagatatcataagcctgacttgcgccgggtgcagtagctcacacctgtaaccccagcactttgggaggccgaagcaggaggtcggctcgaggccaggagttttgagacaagcctggacaacatagcgagaccctatctccacgaaaacatacaaagttagccaggcttggtggcacccgccgcccatagtcccagctactcaggaggttcaggcaggaggatcccttgagcccaggaggtcgaggcctcaaagagctgtgatcgcaccactgcactccagcctggactatagagtgagaccctgtctctaaaaatagggttaaaatgagcatcgtgagtctggtgtcacagcctccgagaagcctctcccacgcgttgccttcttcaccaactcccagcccccgccaaagccggctgcgtgctcccaggacatcacgacctatgctacgggatctgtaggcacagctgtcggcaggtccctgagagcacagccggcatcgtacgcagctctgaatcccccgcctcaaacacagcgaagacgctgggctgtggggagctgacaagtgattgcttgcatctgtccacctgcaaacaaccgcccacaggtgcaggtgtcccaagcacacttatcagggaaatcagaaaaaaatgctaccttttctggcaaaacaggaaaataaacctattcttaaatcctagagaagatgtttctcttttgcaggaaaaggttctgagctgagactgtttcatggttaaagtaaaaacagtgcttgaaactcacgcccaatgaggaaatctgggacgaaggaagtcaggggctgggtgaagcagagagccactatcaagggacagaggtaacaggggagtctgaatgacatcacactcgataaccctccctccacgactttccttgcgatgtccctctttttctccaatccaaatcccacatctcctccaagaaacgctgccatgacgatgaaaaccaccatgacgctgtgaggtggagtccaccaacgtcctctgcccgaccaaaagcatggaattcctcggagcccactcgagtaagctttgacttcctccctgccagtcatgctggacacagggctcgacaaacacaagagacgatcctcggaccatcctaactcaacgactggagactgaggtggccgctgccagaggcgcggccggaggaaacgtcatggaaataaacaagggcggccacaagcacatggggtccgggaagcggcgggcgccaatcaggggcaggaggagtccaggacctgcctagcgccggccgcgcccgtctcccgagcccccttgtgtcaggcccggtgcccggtactcaacatgcgctcgcactccgccctctagacagccctggcaggacgcgtcctcctagttgacatttcacactcgtgaagacgaaggcttagggacatctagtgctttgcaccgggtcccagggtgggtggttccggtcccgactgggaaaaccgtcgcccgcgaacgtgtggggaggaggctgggccgagaacggggaccccgggcgggaccggggtggggtccagacccgggcaggggagccgagcccaaggcaagcaggcgggcgggcattacctgctgcggggggcgcctctccgccgtcaccgggcgcgccggagccccgggccccgcggtgccggaagtggcagtagggccgccggcagggccccccgggcgccccagaccaataggggcagtcaatggcccggaagaagccagtggagcgtagcatggtccgtcccgcggcggggccccggcccggagccgcccgggccccagggccccctcactggcgccgcggtcgccgccgcccgcgcctcacggaccccgccgccgccatcttgctccgaggcccccggaggccctcgggacgccgccgcaagggaccccgggaggggctgcccgcagcgcgcctgctcagaaacgcctgctcctgcgcgaccaaggctggtgacggacccctgggccgggacagacggccgcgggaggaagtaaggagggcaggggctgccctgcctgcggtctccgggagcctcgccagcgccgccgcccgaccttcggcggctgtagcggcgccatcttgagccccaggcccctgcggcgccagggctgtccacggcgcgcctgaccaaaaaagccccgcggggcccgctattactcatttgcatattatttcctttcgttagcatatcaccttaaggcgccctctgctggacgaggagagttctgcggggaggtggccttaaacctgggccaggtgaaactcatggttgaattactccgttcacagtctttaaaaatcccctcgccctggtatacagctggctctcaagaaacgccttaatctccccaacctcgactcttgtcatcagtctaatgaccaggtccacgttcactcatttgttcaacaaatattgagcgcctactgtataccagctagagggtgcattttaacagacaaacgaggaacaaggctgggatggggcaactctgtagtctggtggagtaggcccacgtcttaatgggaagtttaacctggtgcattttggtgggattgtaaaatagtgccactgctatgtaaaacaaaaaacccaaaaagtttgtttttaagagacagggtcttgctctgtcacccaggctggagagcagtggtgcgatcacggctcactgcagcctcgacttccctggctcaggtgattctcccacctcagcctcccgagtagctaaaaccacaggtgtgcaccatcatgcctggctaattttttgtattttgtgtagagatggaaaaagttaaacagaattaccctatgagcaactctattcctgggtatacacccaaaaagaatagaaagcaaagtcttaggtcgggcacagtggctcatgtctgtaatcccaacactctgggaggctgaggcgggtggatcacttgagcccaggatttcaagaccagcttggccaatatggcaaaaccctgtcctactaaaaatacaaaaattagctgggcgcgatggctcacgcctgtaatcccagctctttgggaggccgaggagggaagatcaaccgaggtcaggagtttgagaccagcctggccaagatggcgaaaccccacctctattaaaaatacaaaaattagctgggcgtggtggcgggcgcctgtagtcccaactacttgggaggctgaagcaggagaatcacttgaacctgggaagcggaggttgcagtgagccaagattgcaccactgcactccagcctgggtgacagagtgacagtccgtctcaaataacaatacaatggttaagatgacaaattttatgttatgtgcatgt

SEQ ID NO: 511 - DNA, 182897 bp, Homo sapiens
  source 1..182897: mol_type = genomic DNA
taccgcgcgccgccttcttcctcccgcaccgtgaccttaactcggcacgtgctggcccctcgggctccccagtctccgtacattgtcccactcagctctgattgtggggagggggcggaccgagggggcggggggcgtctttccgaaggatcgcggaaagccgcgcgctgccaggggcccggggttagagacccccactcccgcacggcgttagggactccgcgcttccccgcccccgccgcggcccgccggctctgcctctgtccatggtcaaagcacccggggtaatccgcctttctcttccgcccgccgggccccattcatattctaatcacagcgcggccgacccgcgaacggccactttatcggggcccgcaggagacgcagcttgctccccctcacttccacttccagcaccccccggccctcgcccccctctttctgcactttcaactccgccgaggagggggtccctgggaaaaccgcgtccccacttggatgccggggcttctcacaaacttcgaggccgactgggggacggcggtggggtggggagggcagggggagggcggaggaacagagacagacagactgacagagttacgggaagaggcgggggaggggggacagtacagagagaccgagggggatagagacagagaggggcagagtcctagggggagacaaagagaagtggaggcagggtctggacagagacactagcagccaaggaaggagaaatggacagagacagagacacagaggacgagagggacagagagctagaaacagacaccgggagacaggcggagagagacagcgagatggaaggagagaaacaggatgaaggacccaggcccagaggaagacagaaagttctggaggaggcgaaccagccactcacctcctccccgcctagcggccttgttacgctcatattggggcatggggtcttagggattcagttccccttccccaccctttccccttcaagctcgcttcactccccacgcgtgtctgcggatccgcgtgcaaggggtcaagacataccccctcccgcattctcagggccaccacccgaaatctaacccaggaccaaaatggggggtgggtgggggcgcaagagaaggaagggagtggggccccactcgtggtagcgcaggcgactccccaggctccaggagttccccgcggctccccccccgcccgcgcccccctcccggcctgccagcacggcgcggggcccgatggtggggaagggccgggagggggagggggccacatctaagccaattttgatttcgcctataatgagtgccgggcgaaggctggagaaggcctctggaactttaaataagaaaaacgttgctaatgctataatagaagggggaagtcggagggctgggattgcgtcgctctgagccccccttttcggaggcggcttttcttattcaaaacaggcccacaatgggcttcacagtgcgcctcgccacggccccatctgacgagcggccattcatcaggccggctggcctatcaatgacattgctcccatcggggctcctataaaatgatgctttttcccatgaaacatccgcaaacattttgacgggtttggctttgcccggctggattactgagtgtccccttgctcgctcgctttttctctctcccccttctccgagctcgctcccttctctccctctctctcctcttttcttctttctcttttctttcctcttctttttcttttcttttcctttcctcctttatccttgtgccccctcactttctgcgtctctctctctccccttctccctccctccctcccttcctccctgggcatctctagcacaggggatccccaaacatcaggacttttggggggcgcctgtgctgtccatgggaagagcatgcattgtgggttactggaggaacccgacatggattccacaggttagtcctactggcggggttggggggatacattgggagggaaggagaagggagagggggaactttagaaagaagttgggaaaagttcagacgggtcaacttgacagtggaaccccaaagaataacgcagagcttgcagaagttttcaattcgaggcgatgtgtgtaactggatgcgtggaagtatgtgtataagcgtgtgattgtgtacgtgtgtgagtgtgtgtgcgtgcgcgcgcgcgaaggagcgcgctttcgcttgccctggacacaaagttacgtaaagatgcgctggctcgcggcgagctcgaggtgccacttgcagaaactttgccagccgaccgccccctcccggacccaggtcctcctagggtatgggggcctcggaatagcggtgcgctcggggtctggcggccagggccgggaagccgagcggaacgccccgaggcgggggagggtgacggcttcgcactgcgcctgggaggtggggaccgaggctccggctggtagagacgcgcagctggagggagtggcggcggcgaacccggtggtccgggggaatccgcagaaacgggaggtgggagtcctgggctgtggggtcgggcttttagcttttctgccaggaaggggcacccaacgccgggctccactagggagctgtgaccttgctggagggagggcaggacgcagactggcccgctaaactcggcgttggggtctgcaaactgctctgcagttcaagagctgctgggcgtcagttttgggggtgcggcggtccttaacaacgaaaaaaggaggccaaggaatctttcacaacgaaaacacccggtatctcggttcttcctccagtagttttcgccacctcccactcctagcacctttgaagagccgtcacacttctagatctgttaacgctccctaagtcccttgcaggtggaagttctcttacagttcaccccctcccctaggctcattcttgcaacccggctattttcattttggccccctgcagcctcagaatttcttagggtgatgagtttggggagaggcagaaatagggcagtggactcagcctgggccgtggcgaggtttgagagaatgcctgcaagcataagctgctgagcattgcagcgcggagcaacaagtgccttccagccccggccgtcccctgagcatgcacgtcctttccttgagcaaataaacaaatgccgcacgaatgtctccccaactccacccctaggcaggctggatatggaagtggggtgggggctggggtcatcggggcattgccccagaaggtctttcctcggtccctgcagaaatatttaaggcctctccaggtttccgctgcagccctggtggcccggacaccggactgctcttgccagggggatattctgtgttttagggtagttgtcgatctctgattcctagagtcaaggccccgcctgattgcactcccctggctgggtgtgagcccccagggagtggggaaaggctaagccccgaagttctccttcctatactcgatgacaaacgaaggcaaggagaagcgtcgcctgccctgcgtgcctctccggacacggcaggccccgctgaggtctctactggcggtaaagcgggagcccagagagagaaaagcgccttttccaccattttttcatctcaagcgctgcgccctcaccacctcctgagaaccctaacattaaaaatgaatatccttaacaaacttaaacgcatgtctgcagagtttgtggccaagtattttcgagcggcccacgcagggacatagggtctccctacatcccaaacctgcagtggccctgctggggggcttttagctgcctcctccacagggccaggcccctcggtacttctggggaggactgtggggctgtggattcgtggcgttttctgttctcgatgcaactggtgctcgtgggggcaccgggtcctcttcacctcaactgcaaacactccagagacgttctgaaatgaaatcctttccccatccacttctctcccttttgtatatccgagacatccctaggtcaccaccctgaacgcaaaatcaaaagttttggtacacgacagtgtgaagaaatgacactagacgcaccaggtgacatttcactccgacttgcaaaaccgacgacaagggaagtgcggctcggcgtggtccagtccagaagccttccctcacctcccttccagagaatttaatccaattagcctttcttctgagtttcccttgttatgtaaagggtcttttctcctggcttgcagagacgcgcgctccatggagcagttcgattctgctccttttgtataagatcgcgcgcgatcagaaccaggaatattgctgttattatatcattccgaaaggactggaacaaccgactcacagcaagtgctggggcgaagtaggaaacgtccaggataagagaggccggcgagcggggccaccgtcccttactcttaaaaggaaaatccccgcgaagtgcctcgggcccgggagaacagttttgcaggggccagggctctagtggcctgctttggggccacttcagcatgacctgcggaaacgcgcccctttgttccgcacactgagccagtaatatattcctcgggtttccccaaaatactcaacaagtgtggagctaagacaatggcccggtcgggggaagctgggcagccggcgcgcgcctcctgggccctaggcgctctcgctgccgagcccgacaaagcaaagcccctctcggaggcaaagccccagcttgccgcgcgccgcggtgctccggcaggaggcaaaggcgacaggcgcgcgcaggggcagtcgacgcaccttctggccggtgcgcggtttgcagtaagcgcaggcgcgcgtcccgctcggcccgcgctacagccccacgccgcgcaaaagtgggtgctgagccccgcgtggcctgcgctccccacgcgggccaccggcagctacgtgtttgtggccgccgggtccaatcagggctgctctgcccgggtgatcgttgctcagttactcaagttatccggaaattcgagaacgatgggggaaagtgggtagaattttaggccaccgagaacttgtgcaaagtgggccgggccgggtcggtcgcctacgcaacagaaggatcatttcttttaaaacgggatggcgcgttagagagggccactgccaagctggagctggaaacttctgcctccatccactttccgctcccatctccagaacccagagctgaggcggccaaagtacttcctggagccggatttgagttccccgggccgcatcggtgggagggcacgctagtttacaggcccccagctcagcacaaattctttctaaaattctaccaccaaattaattatatgcctttgtgggcccggggtagggatgtccagtggccttggcgccgtgcccacaaggcaaagtgcgtcctggagggaacagggcccgagcctcctccattcttgcccaggcacagccctggggaaggagccactgtctgcgggcttgggagagcaaggagccggaggtccgagccttgctccagcgcccaaaccagacagtctcgccctccccgggcgtgtgtgtgtgcgcgcgcgcgggcgaacggggcatgtgcgcccccatctctgccacctgctaagcgccggcgtctggatttggcagcggggtcaagtgagagccgcatggtaccagggttccgagtccccgaggctgcagcccttgatggcgcggaggctgcacgcaggctgggtcctcggagtcccggattcagcacgcgactctgtgcggcagcctgggacagcgcgctttcctacccggcctgcaggtcccagagactcggaaaagtttgcaggggccgcccggcgcctcgggcctgggatttccaaagccgctcccgcccccgtccccagcgcgtcaccatggagactgctggaagttggtggtggaaaacagacctggcgcaaagcaaaatattatgagtgcagttggggtgacttcagggggcggggggaccggagggcaggagcgggagccagaggcagaggccgacaacaaagggcccagtgcgaggaagagagaggagtttgcacggggcctccccgccgctgtgtgagtgctggaccatcctgcttcccagaggctccgaggtctctaatttctctccagcagctataccttttctcagcccgccttggagcccttgctccctccctcctctccgggttctcttccagcctcccccctcacccgtccggaggttaggcgccagctgggcagtgcgcccgcctccccaggagccacaggctcaccaacgtgaaaggttctggcttttcttccccacgacccgtgggtcgcccagggtgagtttctcaccccctatctcaaacccgatctgaaagggtgatgggttagaataaggtgggaacggaacgggaagagaagggagcgtctggccagaaatcttgcgagtggggatgggtaaagaggagattctgatttttcccccctttttacagtgagaaaggcgctgagtcgtgattcaactcagccacttgtaatatgactttaggttaatcttctaggctttccaagattatttttaattgcctgtaaaatgaagggttagacagctcacaggctgggatctctgacaaggtagacatttccctctattcctttggctttactgtagaatccaggaagcaatatatgagctggttaccactatctgaaatatgacccactgcacaattaggtaatttctcctcgaactaatgatatattattttttgcaaatcatttgggattttaagagtcaataaccatgaacaactctttttaaaggcccagaatgtcctttctcattgccacctgcagtgcattccttaattgtttggccaactccctccatccccaaaggatttactaaaagacactagactttatggggctgtatccagtgccaatttagggaacactgaaatgcttctagataatgaagctggcatcacagaccctcacatatgtgagagaggaatacacattggccaatgtactaaaatgcggccatcaaaggaaaatcactccaccctccactgctcaagtttttgggaagaagtctcttctcacgcctaggcatccctcctgatgacaatctgggcaaaggagcccttctcctttccctgagattccattgcctcatttgcaaaagaatggattgggtgtaaaaattgatatgctctattgagttggtgcaaaagtaattgtgggtttgcacaacccgcaattacttttgcatcaacccaataaaattctacctctcaattatatgcctgtgtccgcgtttgtgttctgacatctatgtcaaatcttctgggtactttgtttataaagtagttttactgacattgagcctcccaggcactccatgagcgtggcattattctgaaacatagggtttttctttcatttccaacattttaagactgatttctaagccaagttggtctgtttgcctcagtgtcttttccaaaaaggctgagaagatataaagtggtgacatcacaagttgggatgccggacactcaggtctctactccacaggttcctgagagcccatcctacgtgttctgcaggtcacttgggaaactcttcagctgcccctctgatggccataaggctctgcaggatggagacggtgggagaaacccccaatgttgtttttaacctcttccactctattttagatatttgcaattttattaaggtttaggggagagagagaatgaacttgaagagtttatttggaggtatcaggtaaaagtgaagtttaaaaaaagaagaaaatagactactttgggttttattcagtctcacttcctgactacctgctaggtggcagaccctgaagatgaacaaggtcacagtccctactgtcgaggacttcagaatgcatttactaagagaaggtatggacacactgagagtggtgagcactacaaggaacataaaaattgagtcattttggagcttagaggaaaggatgctctctcttgctgagtacctaccatgtatcagctctgtaacaggcactttttcacacattagccattgaagccttatcacaactctgcatagtctctttttaggatgaaagagggtctggaacctgcctgaggtctcaactggtacatggcagagctagattggagagcagactaggcaacactcatgccctctccccacccaggccacatcacctagactctgctgtcgtgataggtcagggtttagttatgacactggctttaggtggatttgaatcccacttggtgagaagggaaacagatggatgagagtggagaatcacagaatgttgtcttccctgggctccagagaaaacccctctgaaggaatcctgtgactccgcctttaagggggattttaaatggtggcagcaatgggaggcagtgtatcacagcggttgagtagagatttggggcacagacaaatcttggctttcttcattcatgtgttcattcattcatccaagaagactatgtgtctcctatgtgcccagcattctgctacatactgggcttaacaaaaatgtcatctttgcttccctagagcataagttctagacccacaaataagtaaacacaaaaatagataatttcagtaagtgattagcaatatgaaggaaaaaaacctatctggagtaataaagacagagcatggtgatggggttgttggcttcatagggtggctgtgccacgtaaagctgtgagcatttggtctggaagcttaatgttgctgagcctcaattttcttatgggattgatacaaccagctgatacagctgtagtgaatatgaaatatgaaagtggtaatagttaacatacgttccatacttactgtgtcttcactttgctaagcattttaagtacattatctgtgtaatgctcacaacaatcctattaagaagaaactgtaattattaagaagaaactgttattatttacagtttaaatagagaaaccaacaagttaaaggaaaaattgaaactagaagctgacatgttcaataagtttctgagccctaggaagctgggctggcaagctgtacctcgattgcttgggaagcaagatcactcttattgtgtgttcctaactttcctgaggcagaatgcaagtaggagacctagcttttcatttgtattttaaaaagcaaatgttttaaaaacactgtgacagagaaaggatataatggccaggtgctgtggcttatgcctgtcgtccctgcactttgggaggtgaggcaggaggatcacttgagggcaagagttggagaccagcctgggcaacatagtgacactcttatctctacaagaaatttaaaaaattagacggacatggtggtgcatgcctatagttccacctactcaggaggctgagatgggaggatcacttgagcccaggtgttcaaggctgtactgagctctgatcacaccactgcacttcagcctgggtgagagtgagactctgtctcaaagaaaaaaataaaaaagaaaggaaggaaggaaaagaacaataaaaaaagaaaaattaaaaaaagaaagcttatccaagagatgagtaagtggcagaaccaggatttgagcggagggcccacaacccagctggctggctcttagatccatactcttagtcatgaagctgtatggacaatctcttcttctttctttctttctttttttcattagggagagggtggcagtgggaggaatgcccagtaacatacgtagcattttagcaaaagtaaatgacgtgctattttctccctatatgaaagtgttaaaatagtccctttttttttttttttttttttttttgacggagtcttgcactgtcacccgggctggagtgcaatggctcaatctcggctcactgcaacctctgcctcccaggttcaagcaattctcctgtctcagcctcctgagtagctgagattacaggtgcccgccaccacgctggctaattttttgtatttttagtagagatggggtttcactatgttggccaagctggtctcaaactcctgaccttgtgatccacccacctcggcctcccaaagtgctgggattacaggcgtgagccatcgcgtccggctaaaataatcttttaaactgtaaaggcaaaatgtataattgttgacaaaaatagggacataagtaaatcattcatacctttactacacacgtgaaatgtactttcatcttctttgggattcactcaaactttggttaatatttgctttgtctctgagaaagtcaaggcttcattcatgcaacaggaagaataatagaatgaagcaaaagcagctaagtaatatgataatatatggagcctttaggtaacttaaacaatatattgcatctagaagtcattcacagatatgtgttaaaatatggcttcaggggtatgtagtgtgacttagtgaaaagaacatgagctttgccatcagacaaggttcaaatcctgtatcagttacattcttgctgtgtgacccagagcaaattatcttacttctctaagcctcagtttccttctttgtgaaaatgtctactcactacattctaggatggttatgaaaattcagtaagattgcacgtgttaagtatttgatttcatgcctgactcctaaaagttgctcggtaaaaggcagatattattattattattaacaataattatctggccttcctatactttattctaggtgtctagttgggaaaggggataagaatactgaaaaaaaaaatgtagactgttttagaatacctagatgtgcttgtactatgtagatacaaccccagttttaatgttgagataagtcattttttttctgaagggtttagaccaaaagactaattttatttttatttctccacctttcccatgaagaaggcattttatatgcccctgtttgccattatttcatccttgtgttttccagtctgttaaaggaagtggaaaatgtgtctttgtggaggcaacacctgtgggcttgaatttaaatcctggaagagagatctgtggtgtactcagagacgacgtatgttgcacaaccctgatcgaggcccctccacaactcctgatgcccttccagttctggaatgtgatggcccacatttttcatgcctcttcctcttgccttccccccaccccagccccctcaaccacccaaccctcttatgtttttaggcatcactgttttaaggattgagccatttttacacttggttttcaggaagtagaaaactcagtttcaagtgagccgttctctggaactcattttagcaggatgcagagagagtttggttcttttgcctttcttgcatttatatatatatttttaacgtgaggataaaacgtccatttgttctgtttttgtctttacactttgatgtttactaacactgcagtttttgagttcttgaaatgtttacgagagggaaagagatgataaaaagcagaaaagaatgaaatgcagccattttgctttcagttgaattgggtccaaattgaggcaactagggctggattgacctgtgccgggagattacggagtttatgtgtgtcatatcccaccctcaaggcaggaatacttcaaaagatgtgtacagtttccacttttctggttggttattcttccataaaacataaaagcattattgtgcctcggagcaatcaataattattagtagagaggtgaaaatggacacgttggatttgtatttttgtagttgttttgttttaatttaaaagaacaatgagaaagcctttgaaaaggctgcaacccggtgaaggttagttagcactttgtgtcctgtgtgttttccagctacccagtagttgtgctaaagaccggtgtttagacacaacctaagtgagactgctgaatgtagcagatatttatttaatcagaatggaaatttaccactacataagcactgatgtcctgaatccatcatgttggagaaaatacagtatcagtcaatggaagcaaactagtctttgaactagattttgaatggacatttggataatctaacgagtgattagtgattgacaattacatctccaagccagcatctaatttttgagacacaaatgcattttgtgaataaaatgatgtcagtgcctttgttttgaatcttggccatcaaatcatcgcaagttacattacacttttgaagaaggaagtgtttcttggaatgttgcgattataggatttataatttttaaaagtgagcatgaaagagtttttgagttctacgttatctttttctgaacgtgattagtccaaatttggggtgtccatacatagaacatatttataatttgtgtactgaatctaaatgctcatgaataagtcaagtttctattgaagtcattaggattttataaagttccagaattggcagaattgggtccatggtataaactcaaacctatttatggtggaactgatggattattctaaacattttgccaagttttcttcatggtgttcacttccactgctgataataagtctagggtgagggaagaagtagggtgcctttgtaaagttatttgcctccccaaaaagaaaatcaacacagtttgcttcctccttaaatggctactaaccgggctaaaatttcttttacttttatttcttttactcagtgactcctttttcaaaagtaaaataatttctccaacaagcattattggacatcacagaaaataaataagtctgcctcagaaagctctgggagtttacaagggagaaaaattccagagggcttgaggccctcagttaaaacattaaaacttttaagctttggagagaagatttctaaagcgtcgagcggttgttgtgagaaaggctttggtctccgtgaacttttattttcaactcagtgggcagagtttttgaggtttctgtggtttgggtaggggaccttttcagaaatgccaggcttttagaaaaaacacagcttttcttctaatcaaggctgcgttttaaagtttgaaaactttggtgtgatgacaagaataaattatttctctgctacgttgaggtttcctctgggtgcccaggctgcggggcattctcgcctcggctgcctcacagggcacagctgaggaggcgctgggagtgggagcgccgtcagtccagagctcgccccgcatgtactgggcagcctcgcacagaggccggctgagccttgagcgccgctgggaaaggctgccgagctgagcagtgcacagggatccaagccacggaggacctacacaaggatgccccatggatcccgtgttctgctcaaagtttttcttggtattgagagggattaaaaaaaaaaaaaagaaatgaaaacaccaaggctgtatgttgtatatcgatagctgatgataaacagagcattttgagaaggaagggagaaagagagggagggggaccccaagggaggatgggaggcaaggaagagaccccatcagaatcatttccataattgacagcaggctaacttaatgagttttttcaaaattattagtttcttttttatacaagtgagtcccttttggaaattgagtagcagattaatcaaacttgtaattttttccaggcactgtgctgaacacttatgcatgttactttatttaactcacatattgactctatggtattattactcccagtttacagatggggaaactgagattcagacagcctagttaacaatatgtccaggccaaacccctagtgtcaaaccaggatttgaacacggattactgtgattccaaagccaggttgcctccttgcctccccaactccagagctagaaggaagacctgagagttttacattctagttcacctcctctactgcataaagttcaggaggtccagtcattccctcatcctggtgggagacagcagctcacactgccattctttggagtgtactgtcgtgggtgtcagtgggcgactgggtgccactggccttgagatgtgactctagcagcaggctgctgaggatgcccacgggcactcctccctgagtgggtgcctccatgcaatgtgtgcctttcatctcaaatcattctcagagcttctaagttcaacctggcaccaccactaggccagtatcttcccacctgccagttactttgggaaatctgacatcttacacacatcatcaagggcttcatttctatttacttacagacatgatttcacttagaataggttcaacataaaaaccttgctgttaaaagaacagcaccttccatttgtatagcatgttacagtctataatcatcgatagaatcattaacagtgcgggctctggaatccagcaggcttcctgagaattggttttgccatgggctggatatatgaactcagcaacttaggtaacctctctgagcctcagtttgcttttcagtaaaatggcactattcaaatacccacctcatggagtattgtgaggattaaataaagtaatatgtaaaggaaccagcacaggtcttggcacattgtaaaagctcaataaacagaagctgctttaagcaccacttgcaaggagaaccttgtggtcctctagtgacttccaagaccttttcccccaacccccacacacaaagaccacataggatgatatggtttggctctgtgtgcccacccaaatctcatcttgtagctcccataattcccaggtgttgtgggaggcacctggtgggagatgattgaatcacaggagcaggtctttcctgtgctgttcttgcgatagtcagtgagtctcatgaaatctgatggttttaaaaacgggagtttccctgcacaagctctctttgcctgctgccatccacgtaagatgtggtttcctcctccttgccttccaccatgattgtgaggcctccccagccacatggaactgtgagtccaatcaaacctctttcttttgtaaattgcccagtctcaggtatgtctttatcagcagcatgaaaacgtactaatacacaggaaaaggaaacaaaattttatagaatttgttcttccactgtgttcagtcttttgaggcaatatctcataaaccagtgaattggaaggatcattcattcccattgtacacctggtaaaaccagtaagattcggtcacatgcattggtctgtacagcaactgagtatccaaactgaggtttgttgttccaaagctgatcctgctttgtttaaaccaggccacctatatctcaattaaaaacttataagaaagtgtatttttcattccgattttatatggttatttggagcttttcctttttcaagagttttgcctgtgtaatttttatctgtgtttagcacagtacatagcatctgctagagtggcttgcacatagttagtgcttaataaatgtttatttaatatataaatcaatccatttttaatattacaaaggatgctgcatctctttccttactttctaggaagcctggcccaagggcccctgcaaacttgtttgtgcctgataaattacaaacttgtttgtacctgataaattacagattaactaacactctttggatcccttactatgtgctaggcacagtgtgagtgcttcattcattcatttctttccctccctcctttctgtcctttcctccacttctattgatctgctattctgggccaagggctgtcctaaatacaacgaatagtgggtgaataaagtacaatcagcacttaaggagcttatattatttcttctaatcctcataataacctcatggggtagtttttttttttaataggaaggaaattgaggcccatgaggttaagtaatttgcccagggttgcagagcttacttagtcaattgtaaggggaggattagaattagtgtctttctggcgtccaaggccaagttcttttaattgtattgggagatccaagaatcaaacaggaaaggtgatttcaggtacagactaaggtgggatgccttagaggtgggcctgatacattcgctaagacatacaatgcttaaatcatgtaggcacctgatgtgccttattaactcaattcttacataaaccctgtgagctgttactgatactactccgttttacagatgaagaaccgaaggctcaaggaggttgagtcccttgccttaaggtcacagagcaaagaagtcagaattgaatctagcagtttggctcgccagtccatggtcttaactattatactgacattaaaaacaataacatggccaggtgtggtggctgaaacctataatcccagtgctttggaaggctgaggtgagagaatcacttgaaccctggaatttgaggctgtggtgagctatgatggtgccactgcatcccagcctaggcaacagagcaagatcccatctctaaaaaaaggtggttgggatgggggtgcaaaaataaaaaagaaaaagaggaaaaagggtgcctctgtcaaaaacaaactattgggattacggtttttctgtgtggctagaacttgctctggtccaggtagtattctatgtgctttctgtgcatttgttcacctaaatctcacactattaagatgaggtagacagattattattatccgtattatgcataaggagacactgaggtttgaagaagttaatttgccttgattcattgcgctagtaagtattaagcctagaattcagaaaattcattggtaattagtcactaatcccacctggtaacttttccttcttctaagtgactctcaggaaatgattcaaaacaaagaaaaaatgatatgcaccaagtcgtttattgaaacattatggaaaatggaaacacttgctcaatggaacgtttggcatctttcaaacaatgatgaatatgaagactgtagtgacctaggaaaaatctgcataataatagaacattaagagaaaaacgaatggaaatgctatgtttgctagagttacagttctcttacgtgcacttatagatatgagacttgcgaccaacacacacaaaaaaagaaaagaaaggtagttaccgggttagagtggtgggattgtgggaaaatatgtttctcttttcaatattttaaaatgtaatttctgcagtagacttacaggaaagaaaaaagcattttgcctaggagaagggtgttttggtggcttacctcaaaagttcaggctgggttaaaatctatttggcttctgtagccaggagtgcctggctcctgagcttttgggggaattcacatccccaaacagagcaggagaggtaaaaataaaataaaaacccaaaagtagaaaaggcaatgatgtcaaggatggaataatatcagatgccgtgcagagcgagtagccttggcctcaatgattcttttcctaattttatgttttaataatattgttatagtagaaatagaaacaaagaaaaaagtctgctaacattaagtagtagtaggtacacccttccccagaagttgagggaaaatgaaatttttacaacctggttatgcaataatgtacattaatgctagtgttcccagggatattttcagagccgagatctgcttttacattgaatttatcttcaacaggagatggcactgaacaccttaggttgaattttctctagtttctgaagactcttggtgagttcatgatctctgaacaaacggcatttgtgcatcgttgggagtttcctcgttcttttttttttcctcctcgttgtttttttttttttcttgtacattgcaggcaatgacccttagttaatttccttgcccactttagagttttacatattgagtttccctaaagtgggaaagggcagccacattattgagcacctattgtacaattggtgttatgttagacacagcttagaattcacaatgagactttaatgtatatataattacgagtatataaccacaggtgagtagttaggttcgagtcagattcaaatccctgctcagcagcttaacaactgtgtgatcttgggcaagtcatcgctgtgatgatgatgatgatgatgatgatgatgatgatgatgaaggtgatggtgcttgtgttgggaagccatattccaggagaatgatattagcgtcatctcaggctcacctgtgtcctattgtgattgagactccagctgatgaggaggagacatagagccagtgatcacatggattggctggggagtgaacacagttaactggaaagagttcttatcttttctccactacattctttttttttaaacaaattacttcatccctccagttcaggtctctaagacataatgagcctctagcggcctcctacagagggggacaagtaagtctcggtttgcctggctcaatcctggtttatgcatgtgatcctggcaaaattattaataatattgcttttcaatctcaaaatgttcaggtttggatgataagggatacggtcacccttactccgtggcctcctcttccattctctcccctctaaaatatgtttagcagcaccagatggagctgcccacagaactgctttgcttatgccccactctactcaaaaactttatgagcttctcaaccacctactgaatacaatctagactccttaacccagcattgagtacagaagcaaggcttatgtatgtgcatctcctatagcatctcataaagtgctcatcaagcaggataatatcaggaaacacgtgttgatacctgaatcaatgtgtgtagtcatgctcaggctgcttgtcagtttcttgaaagcatctttcttctgcctgcttcaagaacttcgcacatgctgttccttctgccaggaacacgcttcctccctctctacctggttcatgccttcgcattctttagctgccagtttaatgctgcttcctccaagaagcttcctaactcccccagattagacccaacccccctttttttctctcgcgtggcactcttggtaattgcatctctgtttgtatgattatttatagttgaccacactaaactctaatcttccaaaaagaactgtctatcgaggctgtgtccctcctgtgtagccagcccctggtgcatggtatcccataaatagttgccaaatgcagacagggatgaatgaatgtgggttaccctttctgagccagtgcagtccgcatcacctgtttaaagtcctccaatagcttcttagcgcacttggaataaatgtgaagttcctaggagggtctgcgagtccctacatactttggattcttcccaactttctacctcatttcctgctgctctccccacctcccgcttcgtcatgctggcctcctggctcctcctcacacacccaagcccacccaggcccttgcactccaacatcacctcctcagagaggccttcagtgtccccactgcccaaaaagcacccccacctctcttgatctcccattctatggctttattttcttcataacactcactttctgctgtcttcttgctaatttgtctctgtctccgccacagaatataagctctctgagagcagagaccttgtctgccatgttgatcactagctgctcagagcctgtcaaacagtaggttctaaatcaatatttggtaaatgagggaaggaatgaaagcagaggcagggcagggccccttcctggaacccagcagcccctggggcaggacctgtggcgttgccatggcaacccactgacctgagccaccccctggagaggccacagctgctggcttcctgggcttctccaaactcctgtgtgtcgccactgccaccggcagggagccaggagagagacagaaaggggctgagacagaatgatcaaaaggagagcccaccctggtgcgggaggcgacaggaccaggcctcgacggcgccgttccactggtaatgaccagggcccagggacaggagactggggtgggcctggcaccctcagggggaactggggccaggcccgccttggtagctgtgagtgtggcatgtcaactcttttatgtagcgtttctggagctgcaatttcctaaaataggcctcagcacagtgccctgagagactgttgatatagtgtgaataatggcctctattaaatcccggtgacactttttaagtcaggcagcgttttctgcaggtattgcataagtcaggacctccctgttctcatccagtgcctcaggaacaaaactcagcgtgttcacttctccactgcttgaacaccacggctggctcccagctgcctgcaggcttcgcggcctggtgggcccggcgggcaaggcctttgcaatctgctcctaacggactcttccacctgtctcccaccactgggagtcacaggtcggcgaactcttcacctttcccagaaccaccaggcctttcacagctttgtgcctttgtcctgaaggcagccctcctgcctgaaatgccctgcttccctccttggtctggcaggtgctgaatcctttaaggaccagctgaaatgccaccccctctgtgaagcagccaggctttcctctccatggaagctctcctctctatgccccacagcatcttattataataccaaacactcctggtacctgcttgcttgtagaggcagtgtgggcagtgtgggcatgagggcagtgagtgcaccccagcctcggagtcaggcagacctgacctagctcagccatcaactagcttctctggatctgagtttcattcttgcaaatcaaagttagtcaagtctctgcttcagttgctgcgagcaacagagatgaagcatgtggagcggggcaaccagccctggaggttactcaataaatgccagacatcaccattaggcatctgtccctgtcactcagccgtgagttcctggtggatagaaaccatgccttcctcatttttctatggcccttaaagccaaacacactaagtgccttacctttataattccagttaatctttgaagaaatcaggtaggtaggaatttaggacaatttaggaaccatcccaatgttacataactagtaagtggccaggctgggatttgaaatccagtcagatttgagctccaaaccccacattctcccaagcccgtctctgtcttctctttcatgttgcaccacctccccgtcagtcactctgcatcagccacctgagccttcttgccattcctcaaacaagtcaagcatgatctttcctggggttgggggtaaccttcgcccttgtggtcccctctctctgaatcttgggaaaccttgctccctcactaaactcagtgtctgctcataggctctttcttcccagaggcctttctggtggagaatcccccctccttgtctctcattctctattcttttcttcctttacttttcttcatcacaagcatcgctacagctatgtgcccagtactgtactaggctcttggggacaaggtactgaacaagatagacaaggtcattcgaacttacatgttaagggtgggaaaaataagtgatttaaagaaatggaataaacaaaaaaacccaagatacttttaggtcttgagacgctagtccaccagagatatcctgtgtaatatatgtgtgtcctgttgaatagcttttgttcatcccctctgtttgaacatcgaaggcacttgataattattggaaaatgaataaatggatgcagggataatctaagaggttgctgtcagtgtgtgctataaacttcaaggattacctggctcttgataaccgtcttaataggccctccctgccaggtcaatatgggtttgtgaggcaccactctgaaccttgaactgccttggacgtgccatgtccctgatgcggctacttctgggttattctttgctgctgtaaagagaatgaagccttgtagaaaacatgataactatatatggctctgctcaacctcattatatgtacccgagaaaataacttcacattggggtttccaaatcttcagtccaaagtgcagaggcataaagatcttcctctaaggtatgtgggctgaactccctgaaagtgaaaatccataggcattatctgcctcctcctttctgcccataatcccagatgaatcaggggaagggatgcttcacagcccaggagcctctgctcacggctgtaggcaaatcccgttgggcacttagcacaagcttggtccttactaacaggtcagatgatttttatagatcaagaatgaggcaattgggaataggaagttatcccagtatgaactgaactctctttctcctatgtcccatgcagtccccagaactcagtaccagtattgcagcattgatcacagtctgccttccttttagaacttttgcttcaagcctaactttccatatctataaatagagatatgaaaacataacatgtaatgttgttctggtcccaatttagacaacatatgtgaaaatggcttctatggtacctgccacacaataggagcttaataaagtttttagaaaaagcatgcatttattgtgcgacatctatggagccagccacagcgccagccactgggtgtgagatgatggacaaaaatgacagggtcccactctcatgagctcagggagtagcacgtgccttactttctacttggtaactagagggcagaagccagtcttattcatgtttatatcactacagcttctctctcttttttttttttttttttttttgagaatggagtctcactctgtcacccaggctggagtgcagtggtgcaatctcggctcactgcaacctctgcctccagggttcaagtgattctcctgcctcagcctcctgcgtagctgggattacaggcgtgtgctgcccacacccggctaatttttgtatttttagtagagacggggtttcgccatgttggccaggctggtcttgaactcctgacctccggtgatcagcccgcctcagcctcccaaagtgctgggattacaggtgtgagccaccacacctggccgctacagcttctctttagcacagcttcttgcatctggaaggcacaaaataaatgtgtgttgaattttgctttatttggaaaatcgcctttgatatgttatacttttccatgccttatgtggttaaaaaaaaaaaagaaaatgattaggaaattctatagatatgtggatgtatctacttatatgctatgcattctttgacatgtgtgtcactaatgtaacagttattgaggccagactacaggaaaaattttataacagtactagtagagagtcaaaagaaatagaataaaacgggctccattattaagtggtttaagttctaaactgaagaggctgttgtgtatgacaaaggctgacaaagaatatggaaatgaatttagcaaaattatgtaagtagagttttaggaaaagttcgaatacaaagcagactgagaaaaatgctgcagaattggcacattgttctggggactaaacaggacatagaaaaaggagaaagctcagttcacatttggagagagaactgtgattatgacctgaatttgaatgctggtcttcctcttactagccagatgactttggacgagtcactgaatctctctgagccttagtgttcttatctctaaaatgggcctattaatagcacccacctctaggattgtgatgagtattaagtatgatgatgtatgtaatgcagttgtatgatacctcacccatagtgagagctcaatatacagtgaactttattattatgaaatcacatcatctacaaatcaataaggtggaagaacacagtgtttcattcaaaattcagtatacatgtcattctgcttaagtaattcttgacctctgcaagaccaaaatccattgttaagaataattttaaagtatataacattgacttcagttgacctaaatagaggccttccagtcataggaagctacctggcttgtgagacatgaattggagatgccactcctaagggctccactagggaagaagtcagaggtcaaagtgcacctgcagatccaaggcccgaatctggtttggatatctcagagtgttgcatccacatagtctgaaatgcaagacccttgaatgcatgagaactctaactgtccagaacaacataggtgatggttctttcactgctcagaccattgtctgaaccctcagagtctatcccaagtgccacgtgttcacatggacattgattaactagaagacacccagaagcaggtgaactggatggcaaagaaatgggaacaatttcttccaagaaagaggtgaaacaaatgtggttctttgatgggggtacttcaaccagaaatatggtgaaatgatggttgtcttctcatatctgcaatgtgccagtgagaccagacttattctggattgccccagggagcagagttggctacaggcatagactgtggggtcagagtgatctgagtgggtgcaatgggtgagatgtcttctctttcattttcatggcacctcccaccctctcccacttcttgtagccttgctttcatctctctccagtgtgggattgcacagtgtggaggacaggtgctgccgtgaggaaagttctttctttactcaaactcttgcgggtgggcactgtgctctcttggcttacctggttaatagaaccagcttctctcgggaatgttgccacgaagttttcagagaatgtcccatcaatcacagggggttctcacctgcaagaacaggcccttctaaggaccttgatgttatcaggcctgaatccagtgcaggcaaatgggtgagagggagagtgtttcccttagttcctgatgaaagggggattggggtgtagatgtgagtgtgtgtgtgagagtgactgggtgtgtatacctatctaggaagaccaggggttggcccagaactatagatattgcttttggtggtaaggtttggtggaggcaggggctgcaaactttagcagatgccatctaaatgtagctatggctgctgccagggaaaatgtgccaggacttgaaaggatgagaagaagtgagtggagtcattctggagaatcctgaaaagaactctggagatgtgtaaccagatgtgcgtttggatacagtgtgatgacagacacctaccttgtgcatcccagctttgaaacattacaagctgtctgtctccacattgtgcattcgatgtctggaaggtgcagcgttttaatgttttgaatttctctgctcctcagtatttcctgggaaatatcagatttccatatcctctcaacaagctggcccttgttcttcccctcagatattttccccctacttattcacaattttggaagcagcttttaaaagagcagtttgttgggacataaaatacaaaacaaaacaaaaatccgacatttctcccagctgttggcattgatttcccctctccgcatagcttactcgtccgcgtggcttctttttatggtgtgtaacctaaggtgttaactaatgatcttttcctcggctctttgaattatgaggagtcacattacttaatccctctaaatcccagttgctttctaggaaaaacagagattaaaatccttgcttcagagagttgttgtgaggactcaatgaaataacttatgcagagggcctggcatgttcaaataggtgttcaataaataccagctcccagatcataaagaaggcaatgggaaaccacactgtccaaaagcctgcagccataggtgtcgccacttctgctataataccccatatgccttcctaaaaatcaccacattatacagaatcggccaacaaagaccactcagtttactggaaaaataagcttaggggcacaatgctgaaaaactttgtcaatgacacataataaaagatagaaacctaataaaaatgatatcacagttttgcacgtgttaaatggtttagaaatacacaaatacaataaaaatggcacttcaccttggaaaagacctgaagattgcttttagaggtgggtatcagaagggttgcagcctgtgagttattatgaagtgagcaggtgtgactcataacacaacgtggaccgaagtagctggtaggtgtctgaggtgtgaacgtgagtgtgttctgcatatttctgtggtgctaagtataatggggggtggggtggggggggcgtggagttttctgcattcacctaatttttttatgaaataaatggagcataaaaagacacaaagtttgcactatgctcaaattgttcccaaatatatcacttgcattgggacgcatttgttttctcaggacaagtgttatagcagagctgactgtacttagctgatgttgttgaatgatgaatgaatgaatgaatgaatgaatggtgggtggtctagaaaacagaataagtattacactacattgcaaaaaatacattggtagcctttgaaattggattaaaaaaaaacaaaccatagtcttggattttaaaagggctacatagtggctgggcaccatggctcacgcttgtaatcccagcactttgggaggccgaggcaggcggatggcctgaggtcaggagttcaagaccagcctggccaacatggtgaaaccccgtctctactaaaaatacaaaaattagccgaacttggtggcgggtgccttcccagctactcaggaggctgaggcaggagaattgcttgagcccgggaggcggaggttgcagtgagccgagatcacgccattgcacttcagcctaggtgacaagagcaaaactccgtctcaaaaacacaaaaaaagaggggctacatagctaccatagtgcttttgatttcttctcctgctgtggcttccagtctgtgagagctctttgaggggtccctggccaaagggaggcaagctacaaggttccctgccctctttcaaccagagtccctaaagttttacctgcttttctctttgttttcacttgaagaaaagttctgctgctaattcacaagtttacaaatcaccaccagtggttcagttggccaagtctggttttacaaactgctactcaggaacataccttctttgctcagaaagataatcctcagttggtgctacaaatactccagaattcatggaatctgaccaagaagtactcaagtgaggcttcaaagagccattttgcatccaaactactcagcagtctcatcagcagcagcaatggtgcacatggaactccatgcaaaatcccattccaatctgggcagatgccacatgaatattgatgagcatttaaatctaatgcatttatgatgttctgtctcttcacaaacacccacagcaattctgtgattttcttttttctttttcttttctttctttctttcttttttttttttttagagagctggattgaaagatgtctcaacgaaagtgaaaacaaacgttattccagccacacatctctggggaatgtttctaatgatgaaagtaagtgcttgaaactcattcttccatgacatcccagacatggccaatgtcctgatgggagggtagtgccactagattgctaggctgggccaagtcacctggaacaagacactctctagctatttatgaaatatcccaggtcctctctgtaatattccacaatggggagaggaatccattcaggaagacctggaaactaagaccacagcaaaaacttgctgtttacatactcatcttctgcaggagacttgctagcctgcattcccaaaaaccttgttatagtgacgctctaggcgggcaaatgtggaccctggttgggaaaggccattctcagtgtccactgtaaatatgggttcaaagtagttgtgtcacaggatagttgttttagccataaatgtccttgatatcagaaagcagaaatttcttccggttcttggactagagagctagagttaactgaaagatgtatcatcctgtgtttacaccttgtcctgtgttatgtcagactggggcttctgggtgctatattaagagcagtaggctacatgggacttgtattttttcccttaaacactaaaaaagagggatcagcttattataagtctaattttttgcagagtcagaagtgtctttcttccatggttggtaaagtgcatctccttcgttcagttttctgaaagcatgagccccggcccacctgctccacaatcccctagcatgtttgctagatctactcaatagccccctcctgagtcttagctggcattgtcattctatcatcaccatgtcacttcattttataaaattgagctacattgaacataaagtatacaaatcttgtgtaattagtttgatggggttttttttttctttacatattgtatccactggtgtcattactacccaaaaaagatatagaacctttcttgtcccccaggaggcttcctcatgtctcctccctgtcaatcactactgtcctgacttatcactatagcccgtttttgcctgcttttaaaacttcatgtaaatgggataatggactctgtattcttttgtgtgtaacttttctcagtcagtataatgtctgtgagattcattcatcttgttgtctctagcagtagttatttctttttcattgctgtatagtatttcactgtatgagtatatcacagtttacagatccttttaagtgttgatgaatatttagttgtttcaagtttttgattattaagaataaaacactactcgagaggctgaggcaggagaatggcgtgaacctgggaggcagagcttgcagtgagccaagattgtgccactgcactccagcctgggcaacagagtgagactccatctcaaaaaaaaaaaaaaaaaaaaagaatgaaacatatctgaacattctaagttttatttaagtttggcaaaatctacataacataaaatttagtatttaatcatctgaaatgtacaattcattgacattaagtacattcaccttgttgtgcagccatctacaccattcatttccagagctttcttcatcttcctaaactgaaactctgtacccattaaacagtaactcctcattctccttttccctcagtctctgacaactactattctactttctgcctctgttaatttgactgctctaagtatcttatataagtgaagtcatatggtgtttgtctttttatgactggcatatttcacttagcataatgccttcaaggttaatccatgttgtagcatgtgtcagaattttcttctttttgaaggccgaataatattcctctgtatggatatgtcacattttctttatccattaagacattgatgggcaattgagttgtttctgtcttttggtcactgtaaataacgctgttttgaacacaggcatacaaatatcttttcaagtctctgctcctaattcttttggcggtatatacccagaaatgaaattgttggatcatatggtaactctgtgtttaattttttgagaaaccacaaaactggttttcatagtggctgcgtcattttacattcccactagcaaggcacaagagttccaattttgccacttcctagtcatcatttgttattttctgttttttttttaataatagccattctaatgaatataaaatggtatcccattgtggttttcatttgcaattccctaatgattggtgatgttgaacatcttttcatgtgcttattcaccatttgcatatcttctttggagaaatgtctaagtcctttgcccattttaaaatcaggttgttttctgttgtttagttgtaggagttcttcacatattctggatcttaacctcttatcagttatgtgacttacaaatatttcctcctattccatgggttgccttttcactctgttgattgtgttctttaatgcacagaaatttttattttgatgcatccaatttaactattttttcttttgttgtctgtgcctttagtgtcatatctaagaaatcattgtcagatccaatgttgtgaagttttcgccttttttttttctgagagttttacagttttagaccttacatttagattcgtgatctgttttgagctaacatttgtatctggtattaggtaagagtccagctttattctttttttttttttcagacagagtctcactctgttgcccaggctggagtacagtggcgctgtctcggctcactgcaacctccgcctcccaggttcaagtgattctcctgcctcagcctcctgagtagctgggattacaggcacatgccactgcgccaggctaatttttgtatttttttagtacagacagggtttcaccatgttggtcaggttggtctcaaactcctgacctcgtgatctgcccccctcagcctcccaaagttctgggattacaggcatgagccactgtgcctgctgtagtccagctttattctttcacatgttggtatccaggttccccagcaccatttgttgaaaagactattctttcccccattgaatgtcttggcaccattgtcaaaaaacatttgatcatgtatgtggaggtttatttctgggctttccatattattccattggtctatatgtctgtctttatgacagaactagactgtagctttgtagtaagttttgaaatcaggaaatgtgtgacctttcatgttcttctttttcaagattgttttggctattcaaagtcccttgagattccatatgaattttagaatggatttttctatttctggaaaaaaaaatatgccactcgggttttgataggtgttgcattgaatctgtagattgctttggatagttttaacatcttaatagtaagtcttccagtccatgaacacaggatgtctttccatttatttggtgtctttagtttctttcagcaacaacatttactagttttcagtgtacaagtgttttgcttccttggttaaatttattcctaagtattttattctttttgatgctattgtacatgaaattttcttaatttccttttcagattgctcattcttagtgtatagaaatgcaactgattattgtgtgctgattttgtgtcctgcaactttgctgaattcatttattagttctaacagtacttttgtgtttgggtatgtgttaaatctttggggttttctacatataagatcatttcggccaggtgtagtggcttacacttgtaatcccagcactttgggaggccgagggaggtggatcacctgaggtcaggagttcgaaaccagcctggccaatatggcaaaaccccatctctactaaaaatacaaaaattagctgggcatggtggcaggcacctgtaatcccagctacttgggaggctgaggcacaagcatagcttgaatctgggaggcagagggtgcagtgagccaagattgcaccactgcactccagcctgggtgacagagcgagactacgtctcaaaaaaaaaaaaaagatgatttcatctgtgaaaagagataactttacttcctttttattaatttggaatgcttttatttctttttcttgccaaattgctgtggctaggacgtctagtactattttgaatagaagtggtgaatgcaggcaaccttgtcttgttcctgattctagagaaaaagctttcagtctttcaccatcgttagctgttgtttttttatatatgacctttattatgttgaggtaatgctcttctgttcttagtttattgagtgcttttatcataaaatggtgttgagtattgtcatatgctttttctgcatcagttgagatggttatgtagttttccttccttgaatgcaaggatggtctggcaaacaaaaatcaatcaatataatgtatttattgattttgtatgccagaccatccttgcattcaagaaatatatcccatttggtcatgatctgtagtccttttactatgctgctgaattctgtttgttagtattttgctgaggatttttgcatcaatttttttttttttttagatgcagtctcactcttttgcccaggctggagtgcaatggcacaatcttggctcactgcaacccctgcctcccaggttcaagcgattctcctgcctcagcctcccacatagctgggattacaggcgcccaccaccacacccagccaattttttgtatttttagttgagatggggtttcaccatgttggccaggctggtctccaactcctgacttcaggtgatccaccttccttggcctcccaaagtgctggtattataggtgtgagccaccacgcctggcctgcatcaatatttataagggatattagtctgtagttttcttttcttgtagtatctttgtctggctttcatatcatgataatgctggcctcatagaataaattcgaatatgttccctcctctttcattattttgaaggagtttgaggattagagttctgaacattcttgtatatcttttggtgaacatgagcacttattttgttggtatgttcccaggagtagaattgctagatcataatgtataggtatatttagttttagtagatactgccgaaacagttttctaaagttgtgccaatttagactcccactatcaatttataagtttcagtgtttcacttccttgccaacatttgggatagccattccttctaatattagctattttcatgggtgaatagcatatgtcattttggttgcattttttctgataaataatgactgtagcatcttattatatgctcattagacatttgtatcttttgtgaattacctcttcatgtctttttttttttgagtcggagtctcactctgtcacccaagctggagtgcagtggcatgatctcagctcactgcaacctctgcctcccaggttcaagtgattcttctgcctcagcctcccaagtagctgggactacaggcacatgccaccatgcccaactaatttttgtatttttagtagagactgggtttcggcatattggccaggctggtctcgaactcctgatctcatgatccacctgcctcggccccccaaagtgctgggattacaggcgtgagcccctgtgcccggcccttcttcacgtcttttgcctgtgtgtgtgtgtgtgtgtgtgtgtgtgtgtgtgtgtgtgtgtttggttgagaaggagtatcgctctattgcccaggctggagtgcagtggcgcgatctcggctcactgcaagctccgcctcctgggttcacgccattctcctgcctcagcctcctgagtagctgggactacaggcacccgccaccacgcccggctaatttttttgtatttttagtagagacggggtttcactgtgttagccaggatggtctcgatctcctgacctcgtgatctacccgccttggcctcccaaagtgctaggattacaggcgtgagccaccacgcctggccgcctgtgtgtttttaaaaattatgttgttggttttctccttaaaggtttgtaagagttggttttatatcttgaataggagatattaatatttgtcaggtaaaagtattacaaatatcttctcctggtttgtgggttgcttttatattctcataataacttttatgaacacaagttttcaattctaataaaatttaattaatgtttttcttttatagttagtgctttggtatcctattaagaaatttttgcttacctgaagttcatgaaggtctttttaacatatcatctagcagctttactattttacctttcatttttatatcaatagttcatctggaacttttgtgtatggtgtgaaggagtaatcaaagttcttttttttcttattaattttcaactgatagagcacgatttcttgaaaaggtcactctttaaccactgagtttcagtggtgccttcatcataaattggcagattatatatatttggatctgggtctggacttttattccaaactgttggtcttactgtctatttttgggctaatactacagtctttattactgcacctataaaataagtcgtgatatctggtagcataagacctcttgttcttctttacttcttcagtattgttttggttaatctacattcttaacaattccatattgattttagaattagttgtcattttttcacatatgcaaaatacctgctaggatttctgatggggattgcattgaatctataataaatttgggaagaacaccttaacaacatcaaatttccaattaatatatgttgtattagagcctccatgtatttggatcatctttaatttttcccagcagtgttttgtagatttcactgtagagattttacacatctttctttagacttattcctagataattgatgtttttcaatgctaatgtaagtagtaatattttaaagtttttcctaattgttagttgctagcatatgataatcaattatttagataataacttcatatttagccactttgctaaatgtgcttattaatttaaaatttgcattttttgaacattctatgaacatcatcatgtcacctgagaataatgacagctttgcaccttcctttataatctttgtatttttatttcttttgtgtgtcttatgtactggctgggttctctagtgcaattttgaggtgatgtggtgatagtggacatcattgcctttttcccaacctaagtggtgaacgcatttagtgtttcaccattaggtgagatgtttgctgtggatttttgtagatactcattatcaggttgagaaaattcccttctatctttggttttctgagagacttttcttaaatgggtgttgaattttatcaaacactttttctacatttgttttgatgatcatatatttttctcctttattctattaatactgggaattacatcggttgaattttgaatgttaagccaatcatgcattcctgtaataaatcacacttggtcagagtattatcttttttatatacttctgggtgtgatttttatatatttcaggctggattttgttaaggattttggcatctatgttcatgagatttgtggcctatgatatttcttttttattatgttcttgtcaggttttggtgtcaagattacagaggtctcatgaaaaggggtaggaagtttcctatgtctctattgttttgaagagttatataagattggtattctttatttcttaattgtttggaagaattcaacaactgggtttggaattttctttgagggaaagtttttaatgatggattcaattttctaaatagttattggattatttatatttttatttctttttttacttttagtaaattgttacttttaaggaatctgtttcatctaaattttcaagtttatttacactatgttcaaactttccttttattacttttgcctttactttttttgagacggagtctcattctttctcccaggctggagtgcagtggtgtgatctcagctcactttaacctctgcctgccagactcaagcaattctcctgcctcagcctcctgagtagctgggactacaggtgtgcgccaccatgcccggctaatttttgtatttttttttttttaagtagagatggagtttcaccatgttggccaggttggtctcgaactcctggccttgtgatctgcctgcctcagcttcccaaagtgctgggattacaggtgtgagccactgtgcctggccacttttgtctgtttttgacatctatgttgatgttctttcatttttgatattggcaatttatgttttctctgtttttcttcatcagtcttgccagggtttatcaattttattagtcttttcaaaggtccaacttttgggtttgttgtttttctcaatttatatcttttaagaattgcattcatttctgctcttatttttctttcttccttctactttctttcagtttaatttgctgtctttttctagcttttgagataggtgcttagattattgattttcaaccttttctaagatatacatttaaagtcataaattttcctctaagcattgcttaattaatcccaacatttttctgatatcacactttcattattgttcagttaaacatattttcaattttttattgtgatttcttcttttacttatggtttatttagaaatctgttgcttaatgtccaaacattcatagatttcctaattgtctttctgttgttgatttctcttttagttccactgtggtcacagaacacattctgtattatttcaaaatttgaaattgttgagacttagtgtctgtcccaacatatagtctattttggttaatgtccatgcacacttgaaaagaatgtatattttgcattttgaatgtacattttgggtttgttgttgttgtttttgggacaaagcctcgctctgtcacacaggctggagtgcagtggtgcaatctcagctcactgtagcctctgcctcccaggttcaagagattctcctgcttcagcctcccaagtagctgggattacaggtgcctgtcactatgcctggctaatttttgtatttttagtagagatgaggtttcaccatgttggccagggtggtcttgaactcctgacctcaagtgatccacctgcctcagcctcccaaagtgttgagattacaggtgtgagccaccacgcccagctgaatgtatattttaaatgtcccaacatatagtctattttggttaatgcccatgtgcacttgaggagaatgagtattttgcattttgaatgtacattttgaatgtatactggatggagtgttttatagataacagttatgtgattaacatacgttatagattatatacatatgtatatagattatatacatagattatatgttatagataacatatgttatagattaacaacagtgaagttggttaattatgttatttaaatattccatatccttactgttttattgttgctattgtttgttctctcagttactatgacaggtatgttaatatctccagctctgattatggttatggctatcgatatttttagctttgttaatttttactttatatattttgaagtattaatttcttagaaatttaggattgctatgtcctcttattgaaatgacttttttattattgttaaatatttctaccttttctctagtaagaatttttgctttaaagtctattttgtctgatattatacagctacaccagttttctttatacatgggttgatatggtatatctttttcatctttttattttcaatcttactatataatcttactacatttagtttagtaaagtttttcactatagcttttttgaaaaacaaaacccagtctgataatctttgaatttagaccatttaaatttaatattgttactgacattattgagtttaagtcaacaaacttactatttattttttattttcccatctgtctttattcctttattcttactttttagctttttgggaagggattaatagagtttttaaaaatatttgatgttttcttctgctagcttttcaattatacattcttttagagtggttctattagggattacaatatgcatttttgcattcttcactaattattattaatacatctacctcacattacttcttcccccacttcaagctcagtgaaagagcaccatcacattttaacctcattttcctctttctcaccttctgagctctggttttaatggatacatcttgtacaagtgttatacaccccacaaggcataattattattgttttaagcagttaatatttatttttatttattcacaaatttaccctttccagggttctttctcctgcagcagtttcatgcttccatctggaatcattttttctttaactcagataaattccttgcagatttattatcatactgtgtagtatactgaagatcatgaaacacatgtttatttcacatatatttttgaaagatatttttgctggtgataaaattctaggttggtgagactttttttaattttaattttcctttcaacactttaaagttatcattccactgtcttctggggtccaaaaatgtctattgaaaagttagtcatcagatgtattgttactcctttgaatgcaatgtgtctttttgtctctggctggtttaaaaattttttcattgcctttggttttcagtagtttgactatgatgtgcatagatatggctttcttgtttttattcttcttggggatcactgagcttcttgaatctgtgtgttgtctttcatcaaatttgcagattctttgccattgtctcttcaaatattttgtctccctcactattctcatcttctggagctgcagttacatgaatattagacttttcgattatacttcatttttttatgttttgctctggtttgtccatcttcatctctttgtacctcagttttgtatttttttaattgacctgcctttcagttctaaattcccattttctatcatatctagtcttctattaagcccatccaagtgatcttaatttcagatattgtattcttctgtggtaggtggtccaattgattcttttctcatagtttctaaatcttgattgatattctccattttttcttctgttttgtccatttcctctaatttgcccatatttttctctatctcctcaaacatattatccatggttattttaaagttcctgtctgataagtctagtatctgaattatctctggatctatttctattatctggctatttcttggatttcaggtatttttggtccttttgaggtttttcaataatacctcatagttttttatccaatgctggacattatgaatgcaaagttgcagagcctctgggtgaaggatgttagctttctccaacaatattgggggaacgcacccccaatatttcaacgtaggttctattttccataagtgtcggctggctgagaaataaagagagacagtacaaagaaaggaattttacagctgggccactgggggtgacatcacatatcggtaggaccgtgatgcctgcctgagcctcaaaccagcaagttttttattaagggtttcaaaaggggaggggatataagaacagagagtaggtacaaagatcacatgcttcaaagggcaaaaagcagaacaaagatcacatgcttctgagggaataggacaaagggcaaaagcagaactactgataagggtccaacaaagatcacaaggcaaagggcaaaagcagaactactgatgagggtctatgttcagcggtgcatgtattgtcttgataaacatcttaaaaaacagaaaacagggatcgagagcagagaaccgatctgaccacaaatttaccagggtggagtttttccccaccctagtaaacctgagggtactgcaggagaccagggcatatctcagtccttatctcaaccacataagacagacactcccagagcggctgtttatagaccaccccccaggaatgcattcctttcccaaggaatattaatattaatattccttgctaggaaaagaatttagtatatcttccctacttgcacgtccatttataggctctctgcaagaagaaaaatatggctctttttgtctgaccccacaggcagtcagaccttatggttgtcttcccttgttccctaaaaatcaccgttattctgttctttttcaaggtgcactgatttcatattgttcaaacacacatgttttaccatcaatttgtacagttaacacagttatcacagtggtcctgaggtgacgtacatcctcagcttacgaatataacaggattaagaggttaaagtaaagacaggcataagaaattataaaagcattatttgggaactgaaaaatgtccatgaaatcttcacaatttatgttcctctgccacagctccagccggttcctctgttcggggtccctgacttcccacaacacagcaagtgttgagttttgttctagcaggcagagagagagctagcagatctccttaatcttgtcaagccttgcttaagtctagtctatttcacttttgtctgtactactagggtgtggtttttattcctaaagcctggcctttctgggttcactgctgaaagcactgggtgtttaccgacttccctttactttgacccagcttggactccaaccctaaccaattaatgattggctctttagtctctaagctgctacttttccctcaatttcttgttttctcaatctgcatgtatagcttaggagtgggctaaggacttgaggggtaatttgaatacaagtatgtttgtctctttgtttaaagttctcttctctttggaattttgctccttagatattagctactctgtcatccccaaactctccttagctcaatagactatactctttgcttgggttccatttcccagtgtagcaatttggaaagatctttcgggaaagatctttggaaagatcttggtgtttcgggaaaacgccaaggtggctgtagagcttacttctggtgcttcctttctttcaaggcttgtagttcctctagtcctgtctgcatttattgctctccaatgtttccaaatagctatttgtatattttatctagcttttacaatttggtgggtgagttaatctagtgcaagctactttatcatggagggaactggaagtctgattatcaacaactcttagacaaggaaattgagacctagagaagtgaagtggctttctaagcttatacaagaagtcaataccagtgctagatctagaacatgggccacctgactcttgtccaaataaaagaataaagaagtttcagttcacattttgcatttattttcaaaacacaaagattatattttaaaaaaatataatataacttacagtcccacaactgtaagttacatgtacatatatttggaaaaatatctgaggaaagaaaagaattgcctctaatcctactatgtagagataaccattcttgatgtttttgtgtttccttccagtcttttttctttctaagaatactattgttaagcaaaattgtatatatgtatatatttatagttaatatgtatatatagctatcatttattgagcaatgagaagtgctttaattccatgatctcatttctttctcacaatagtccaaagaggtggcttatgattatgagcttttgcttacatatgtagaaattgaagctcaagcatacttgcattcaaattcccttcaagtccttagcccactccaagctgcattttttttttttttttttgagacagagtctagctcactctgttgccaggctggagtgcagtgatctcagctcactgcaacctctgcctcctgggttcaagcagttctcctgcctcagcctcctgagcagcttggactacaggcacgtgccaccacgtccaactaatttttgtatttttagtagagatggggtttcaccatgttggccaggatggtctcgatctcttgacctcggtgatctgcctgcctcggcctcccaaagtgctgggattacaggcatgagccactgcaccctgcccaaattgcattttttccccctagcaggtgtcaagagtcttgcccaaagtcacatagctggtaagtggtagagttgagatttgaactcaggtctatatgtctgcctttcagcattagtctttttttttttttttttttgagatggagtcttgctctgtcacccaggctggagtgcagtggcatgaaatcggctcactgcaagctccgcctcccgggttcacaccattctcctgcctcagcctcccgagtagctgggactacaggcgcccaccactgcacctggctaattttttgtatttttagtagagacagggtttcacggtggtctcaatctgacctcgtgatctgcccgccttggcctcccaaagtgctgggattacaggcatgagccactgtgcctgacccagcattagtcttttatagtgttttttgcacttgtctacctctcagaaagtaatgaaccctcacgtttcaaagacttgccactggagatttcataatttgccagtaggaacaccaagagtagagctcatcacccctgcttagtgattgatctggagtgtcaatatttgattgtgccttgtcatctcctttactagactagaaagccccaagaaggcagaaatgttgtgtggttcactgttgtaaccccagtacttggcacaggacatggttgaagttttaaaaattacttacgagggaaaaaaccactctgctttagcatgttaagaatgctttggcctgtggtcccagctactcagcaggctgagttggaaggaatgcttgagctagggaggtggaggttgcagtgagccaagatcatgccactgcacaccagcctgggtgacagagtgagaccccatctcaaaaaaacaaaaatccagcagaatgctttggattgtaagagacagaaacctgatgatttaaatgatgtagatatttattattttatttaaccgaagatgggaaggagtaggctccggggtttattcaacaactcagcatcctccaggacccaggctgtttatgtctttctgctgagtccccacattgttggtattttgtccccgagttagtacctcataatcacaaggcagctgctgcaggtccaggcatcaggtccacatttaagacaataaaatggaacaaggggaggtgccagctacttttcttcttgtgtgtctctcttttatcagaaaacaacaaaatctttcccagaagccctcaacagacttattttacgttggttttgtccagaactctatcatttatagctgaaaggaaggatgaaagaggatttgtccaaagaataagattatgataattggactgaccacaggtcaaatctagccttgggctgtttttatacatcccatgatctaataattttttcatttttattttattttatttattttattttttgaaatggagtctcactctgtcaccaggctggagcgcagtgtcgcgatcttggctcactgcaacctctgcctcccaggttcaagcaattctcctgcctcagccttccgagcagctgggactacaggagcgcaccaccacgtccagctactttttgtatttttttttagtagagatggggtttcaccatgttggccaggatggtctcaatctcttgacctcataatccgcctgcctcagcctcccaaagtgtggggattacaggcgtgagccacctcgcccgggctttttttttgtttcatttttaaagagtgttgggcggggcggaggggggaagaagaagaaaaggaatagaccatatgtggcccacagagcctaaaatatttactatctggctctatgcagaaaaagcttaccaactcttggttagaaaaatcatggtttacctcttgggctatcataatattgccttggataaaactggggtttgattagcaagcaggaaaaaattaacgattggctattggctggcctgccatagagtgtatctctggaccgggccaattgaaaaaatgccttctcggggtgtgatttcagagaagtcaagattctacccactgagaggactgctttttctggcatgagcctttcagtatcagcaccagggacctggtcaaaatgaaaatgtgttgctcggaatgggagactattcagtttgttagcctagaataaaatagtatgagattttatggatcatcttggcccaactctcctgttttacagttaaggaaactgaggcttagagaagggatgtgatttgccagagatcacactcctagttagtggcagaatcaggactgttactgaggtcttctgatatctgtcaaatgctctgttacgtccctttagcaacccagaaaagattgattcagttgattcgctagagattcagtaagcgtgaggaaatgtgatatgggactgatattttttgatggaatgcagttggaaagaaaaccctggaccagtggggtcaagtcctaaatgcctgatgggtgaagaaaccgagcaagagtggatgggttatttaccataattcaggtctcatgaattctcacttccaatctaaacaattgcatttttcccctagtagatgtcagtagatatgtatgcttctcatggcatactcaccaacaaacaggaggattgtgactgtaaaatattaaaaagtccgtgactgttggagcatcatatacagagaggaaagctcagcagtgtggattagacagagttgtatgggtagaacagaaatttctgcaaaagttgggcccagaagattccctgagcccctactacatgctagactccatggaaatcccaaaattatataatgaaagaaagaggagggagccaatattaaaatatattcagcaccaggcagtatgctgggcataatcacaaccatgatttcttttaatcctctggagggaaagtattttttctccccattttacagatgaagaaactgagattcagagattatgtgacttgttcaatgtcatagcaagtaagtggtagagttaagactttaatttagagctatctgattttattgctggctctcttttgactacataaactgtcttttccatggatccctgctctcaatgaattttcaatctagaagagaagttaaggcacatacttgaatattaacaatgcaaggccatatgtgattgacttcattcaaatgatatgagttgtacttaagaccttgccacaccaagagtgatcctggcctatagcatagacctccctggaagcttgttaggaatgcagtatttcaggcccatcccagactcactgaaacatgctctgccttttaacaatacttgcagatgatttactaattatgcatgctaaagtctgggagaggtcacaagattgaaaggtgactctggggaaggcatcttggaggaggtgacatttgccttgggcctcaaaggatccatgtggttcctgcagtgatgggaaaatcgggggaggcagaaagctacgagactggtcttgagcttggagagttttccagattggcttgaacagagaggttgaagaatcatgggaaatagggctaggaatgagtttgggccacatcactgagggacctgaattccaaacaaggggtctagagtttgaggtctgaggtgccactgaaggagctggctgaggagtgacaaatcaaagtggtgttttcagaaggttggcgtggaggttctatgcaggtggattcaagccagcagacacatcagggctgctacctactccaagtttgaggccttagactaggcaggtgttagagggtttgaagaaattggagaaactgggaggataggatgggtccaaagagcaggaacccaatgggattctttgggattcctgtttccctctttcagagacagaataagtcaaatgtaaccaagaggtgctcaagtcctctagtcttcaggtcaccatttccttaacatctaaatgaaatgactccatcctgtatcctaggcgggagtccagaaccttccaattccctccacgaggtatcagacacacacatgcatgtgtgcatgtttgttgtggaatgtatggaatgaggctcttcctctcctgagacagtccatgctgtgtcccgttccctctgccctttcacagctcctagccactgccattctcctgtcttaccatgttcctcactctgagtgtacacttcttcctttactctcttgtgttactgactgtccagtggggacagaggatatctatagcaaatggtagggaaaagttctaattcagtggcatgatggcatagaaaatctggggtcaccacttaaggtgactcatcactattgtattaaaatatcattgcgggccggacacagtggctcatgcctgtaatcccagaattttggtaggccgaggcaggcggatcacttgagatcaggagttcacaaccagcctggccatggtgaaaacccgtctctactaaaaatgaaaaacttagccaggcatggtggcgggcacctgtaatcccagctacttgggaggctgaggcaggaggattccgtgaacctgggaggtgaagaggttgcagtgagccgagaccacgccattgcactccagtctaggcaacaagagtgaaactccgtctcagaaaaaaacaaaacaaaacaaaacaaaacacatcacaattcaaggctacgtaaatggaagttacatctctctctcactccattcacctcactcagcatgtcttagttgattatccaatttggtttcttataacttcataaaaagatttccagagaagaggaaatgtcattaaaccttatttgaaattctttactaaaaaagacggaaggaactgctcggccttatctgttgtggagaggagaagactatggtgagatggaatgtctccaggagaagaaggaagttcagggtggtcaggagctgttttgtatttccactgagatgtaggccaaatgccctgccaatagcagaaaggcgttcaggcagctcctagagctagggcaacactgagagtccaggacaggattcaacaggagagacctcctgggacacttgcaaagaattggattgcccccatggggtgtctgctgcagttttagtgctggctgggaacccaggttcgagactgctagctggctggcacggccccagtgtttaggctgtgatttaagatgacctccttggctcctccccttcctcacctccatgcccacagtgtcatcaagggctgcccattctgcccgcagtgtcagtctatctgtcctctcttcaccagcttaccttccccactcctctggggaagaaggacataccgtttcctctgggctttgagcacactgccaggccagggcccctccaccctccatttagtctctccatggggccaaaatacttgaggggaaggcactatgtctgactgtatctcaccagcacttaacatagtagggcctggtacatagtaggtgctcagtaagcatatggatattaggaaaacaaaatagaccataaagcctccctagattatgggtgtttataatttgcttccagtttttggcactccaggaccacttatccatttgagtagattcttcctgtggatgcccctcccctatagggtctttttaatttgttcatgcttaaaagttagaatagttttgaatagataatacagccatatggtccaacaatcaaaatgctttaaaaggtactcattgagaagtcctggtctcacctccaacttccccctgcaacactctaccccagcttcctagtattaacacttttgttacttacacgttcttcgagtatttcctcatgcaaatgaaaaattcaaatatatgttcctttttttttttttttttgagacagagtctcgctctgtcacaggctggaatgcagtggtgccatctcggctcactgcagcctctacctctgaggttcaagtgattctcctgtctcatcctcctgagtagctaggattacaggcatgcaccaccatgcctggctaatttttgtgtttttgtagaggcaaggtcttgccgtgttggttaggctggtctcgaattccttacctcaagtgatccactggccttggcctcccaaagtgctggaattacaggcatgagccaccatgcccagccatttgttacctttttaacacaaaaaagtggcatactatatgcactgtgctgtgacttgcttttttcacttaataataaaaaccagaatgttccatatcagtaagaacatagaaagcgtcctcattcttttttggttttcatctttaaaaaaaaatacttgcatagtatcccattgtgaggatgcattctaatttagttacccagatgaacacctgggctgtttccaaacttttgctgctacagacaagctgcaacaaataaccttgtgtatgcatcgtttcggatgtgtccaggtaaagctgtaggatcagttcacagacctggggctgctggataaagggtacgtgggatttcagtagattctgccaaatgaccttccatacagggaagccctgggttttgtttgttttgttgttttgttttgttttgtttttgtttttgagagagggtcttgctctgttacccaggctggagtgcagtggtgtaatcgtggctcactgcagcctcaacctcccaggctcaggtgatggctcctacctcagccttctgaatagctgggagtacaggtgtgcaccaccatgcctggctaatttttttatagagatggggttttaccatgttgctaaggctggttgaactcctgagctcaagcaatttgcccaccttggcctcccaaagtgctgaaattacaggcatgagccaccatgcccagtctttccagctaattttttaaattttttgtagagacggggtctcactatgaccctccggcctcagcctcccaaagtgttgggattataggtgtgagccactgtctggccaggaggcacggttcgctctccccctgcaaggtcggagggtgcctgtttctcatagcttcacagcagagttgtgcggttgtgatttggatttttgccaatctgataagtaagaaatgccatcttggtgtaatttctatgtttattgattaaaactgaccatctttccaccttttaagagcatttgtgttttttccatgaactgtgtgtcatgtgcatgcctattttttcttttggttcttggtctttttcctgctatttttttgggagctcttttctatggtgggcagatgagaccattgtctgtggaatgattgcagttttcctgagtgagtcattatctttgtactcatgttgtggtttttgtttccctcacatagaaattttggattttttatatagtaaaatttatcaatcttttcttttatggctttgtgattttgtatcaaagttagacagcctctttctcgctccaagattatgaaggaattcacccagaggaggcgagaggaagcaggtgtgggcccctcacagcaaatgctgccaacatcacagttttgtttgggatttagccacgttcccacggggagaagggtttgctgccagaggctgatgcccactgccaaaggcctgggtgccagtcaccctgctcatcagctggtgccctttgcaggggctggaaacgaggcaaatgaggggaaatgaaacgtttggcagccccatgttcccaacaggtgagttctggccaggtgcagccaggtcagtataatgaaaggaaatagaattagaactttgaagtgaaatttgagactcacataaacttgaacctttcctgggatttgaaaagaagtaattaatttagaaatgtgtttcctcaatattaaactctgccacactgactccaggcaggaaatattctggaatagattcccaaatgtgaattcatttgacatggaggcagaaaggaaatgatgaggcagataataacttctctaaaatcttcagtccagtactatgagtttgaagacagaatgaggcttataaatgtttgggtctggggaggttttgacatcaactagcctgggtccttgtctttgctctgccactcactatgtgacctcagacaaattccttcacttctctgagccttagtttcttcctctgtaaacggggataatactaatcattaggcctaacattgattaagcactaaggcactgcatttgatgtttcacatgcattaaactgttcactgtctagggcagctgtgaaaactaaatgccataccatgaagagctttgcacagtgcctggcacaatatgagtcctcaataaacattccccgatggtactgctgttttgtatgcttactgaaatcagatgggaaggctccacttttaattgtggtgtcattttattcattcactcattccacaagtgcttcctccgaccctaccacatgtgggtgctggagacaacggtgagcaaggtctgcaccctgcagagcttacaagctaacaaggcagacccagtggtcagtgctgcagactgaatgtctgtatccccccaaattcatatgttgaaactctaaccccctatgtgatggtatttggagatgaggctttggggaagggttaggtcatgaaggctcagcccttgtgaatgggattagtgtctccttataaaagaggccccagagagctccctcaccccttctgccatgtgtgaacacagggcaagaagacagctgtctttgaaccaggaagcagaccctcaccagacaccaaatcactggtgccttcatcttgaacttccaagcctccaaaactgtgagaaatcaatttctgtgtctaaaaaccacccagtctgtggtattttgttacagcagcctgaatggattaaaatgatccatgggcagcgaccacactctgccatggggactttgctggggagcagtcagggtgctgaggcagcacagagtgaataaccctgtccctgctgcagggcttgccaaacctcaggcacatggtccctctggaggagcaataaccattataggagcagggaacacttagatagcaagtcctttgaaccggaagtggttcaattaatactcatgacagctgtatgtgcttggtactattattatccctattttacagataatgaaactgaggaaccaaaatgttgttcaaggtcacgtggctaataagtagtggagctgggatttgagcctggaaatttggccccagagtttatgtcaggaggtagatgcagagaggagagcagagatgctcaccactgcaaactggactgagacctctgcaccgtgttaggaatcataactgccaagtgggagcagaacggagtggcaagaagaccaggcgctggggcagcatcttggcaggagttttttttttaaagcagaccactgctctccagccttggcaggaccatcagcggggcactgcaggtgtgcctgcgaatggctccaggaatcctgctggcctaaaatgatactttacaggatgaatcttgtttggttcaaggcatgtctcccagtgaaaacgaaaaggcatttggcaggaccagttcctaaagtctctatcaactatggctatttacctaaaatgtgttctcctactctctactctcttctcctaggtaaggttgctgctcctcctcagatgcccaagccaggctcataccccacacttggtgctgctatagcatcctggacctgcatttcacagctcttgcctaggacttaattttaaagtttggggtttctttttgttttgttttgttttaattttactttacttttgaaatggggtcttgccatgttgcccaggctggtctggagctcctgggcttaagtgatcctcccagctcagcctcctgagtagctgggactacaagtgcatgccaccgtatctggcactacaggtgcatgccaccgtatctggcactacaggtgcacgccaccgtatctggcactacaggtgcatgccaccgtatctggcttggacttacatttaattggctgataatttatggcctcaagagagcagtgactacgtctgttttttcttaccctttagcacctgtcatgggactggaatgtagcagacgctcaataaatatctgatgaatgagtaaataaatagccagcacttcaggagaactgagatagagagccatcaaataggagggtcaggcctgggtgtgacacacctcctactttagaagaaaagggcttgggcattcagaccctgggcacaaagtcaccagtgatctaaggaaaggagccagcagaggtggacagcacctgtttgctgactgagctggagggcccacattggctttggggtagaccagttctcttctaaacactatcagtagccactggattgctgagcacctagtgaggtcctgtttccattcaccagctacatggcctcatgcaattattcaccctcaccaaagatctgtttccttatttataaaatggggatataaaacttcttcatagcaatatttggaggaataaaatgaggtagcatatgaaaagtgatgtgtagtgcctggcttaagtacttgaccaatgaatgctattattagtatggcatttttaaaaactgtatctagttcttaacatattatatttaatcctcaaaacatccttgtgacagaagttatgattcacatttttttagataagggccttcaggcttggatgagtcaagttgctgctcaaagtccacacagttgggggcaatgctggaatttaaacccatgcctgcctgtcctcaaagccaagttatttttattcactgatactcagaaatggggccataacaaagtttagttgggaaaaaaacctgatataacaaaggcagtattgcttgagtgggagacactgcgatggaatcccagaacagggagcttccctggctccaccaatgggaccacatgcatcttccctgggccccaggtcccagttccttgcctttgctcctgctgcttctgcctcttggagtaccctctcccttggtggcctcctcccagagtctgacaggtcctcttcaaaatgaacagggcaggttacaaactaggatggactgtatgaccctcacatgttttaagtgtagatatgcatgtgcttgtgtgtgaaagaaccctgataaaagatgaggcaaataggataaaaagataacagttgttccctctgttgagaggagcttggattctcagatattttctccatactttcttaattttaaaaagatgaacatgcattacttttgtgaatataaagcaacgttattttttaaaaacctcaaccatcccttcagggctcagctcaagtgccgtctcctatatggagctgtgacgtcccctggtgtgtgtttgccttgtgaggtccttggtgatgccattgtctttgcccctgtaaatcttccaaagcagcagatcccagcagacagaattgctccaaaagcctcctggccggccaggcacagccaagggcaacctttccccgcagatggctgcagagggtgcttttgaacgcttaccctctgttaagctcatttcacttaatcctcccaacaaccttttgaggtagggattattattatcctccatttagagatgactgtcttaagacttaaacgggataattagattgttaaacatcacatcacgttccatactcacctggatccactctgccacacccagcagagacccgtgctgcagccaccttgcttctgggaaagtgacataatctgtcaggtccccttgtctttatctgctctcaccttctccaccctactcctcacttccatcccaccttccccccatctggtgcccatctctggctcactccaggacacagctcacctatcacttcttccagggagtcttctctgacaagctctgctttttcatgtagtctgggttggccgactcctctgtgcctacctgtatcacagcacttaccacttcttgctgaatttgtcctctctctcctctgcctttctcttttcccaaccaaactcaagggcaagagtttaatttctttctccccagtgcctagttggcacaaataagatattcaataaatatttgttgaacaaattaataggattcttataattgccatagaagatgaccattttacaaatgaggaaaaatgaagctcaagtaagttgagtgatttgctcagttctggccagtaagtgttaggattattcgaatctaggtcttttgacaacctgtccaggtggaccaaaatgctgaaatttaaagaaacaaaaatgtaaaaccccgccagttttagggggaacaaaaatactaacaacatgccagtgcaagctaggtagaggtagattttggttgtttttcttgtttaaaaaaatacaattgacaatttgtcattgttgtttgtttttgagacagggtttcactcctgtcacacaggctggagtgtagtggcgtgatctctttgcaacctccgcctcccaggctcaagagactcttgtgccttagccacccgagtagctgggattacaggtgtgcgccacgatgcccagctaatttttgtatttttagtagagacagggtttcactgtgttgggcaggctggtctcaaactcctggcctcaagtgatctgcccccctccgcctcccaaagtgctaggattacaggggtgagctaccatgcccggtcccatgtttttcatatagccttttctttcctttcaattatttgctcagtattataatttctagaagttgggttgtgaggacaagcagctgaacattttagatgtccctcagtattactgccaaactgcatactaaaaacattaacactaccttcaggtataaagaactctgagagtgtcaatttcaccatgtatacaccagcatcaaaaattgtcattatttaaatttgcttttccctcagagatataaggagtgcctcattatttgtttccttttcacttctttgtgaacaacagaggttgagtattgttctatgtgtttaggggttcacttacccacattcttgtgagacccacatgttcatgtctttattgtgctgttctttaagactggagaaggcacacttaagtatttaaatactaagtggaaggcactatgctaggtcctgcaggaggtaatgcagatgactgagataccacccctgccttctcactgagtttatgcttgagcagaagggatggatgtatacagaaataatgctccagtcacctgaggtcaggagtttggcaccagcctgaccaacatggtgaaaccccatctctaaatggggtttctaaaaatacaaaaaattagccaggcgtggttgtgggcacctgtaatcccagctacttggggggctgaggcaggagaatcacctgaacctgggaggtggatgttgcagtgagctgagatcgtgccattgcactccagcctgggtggcaagagcaaaactctgtctcaaaaaaaaaaaaaaaaagaaaagaaaagaaagaaataatgatccaggtggctacactgggcagctaacaggcaaataatgtgttatagaagcacagagttaggatcaatgattgattcctgactaagagagtatcaaggaaggcttcaaagagttggtggcatttattccaggctggaaaggatgagaaacatctatttagaagaactccaggttgacaaagcatcatgaacaagtgttgagtctacgatgtattttacattccgttcctgagaacatttagcattagtgtggtttgggttctaactaccagttagaatggttttggtggcagggaagagaatacccaatgaaaggaggttttatcaactgaagaaactgtgctatctcatagaacaggaggcagccattgtttgggttggttcaacagaggcaccacatgtgacaatcagagcccccaggctttccctttttttctctgccttcctaggtgttgactttgtcctcagattgcgtttttccccatcccaagtttgctgctttcatctagttattgtgtcatctcatagccacattcaaaagtagaacaggccagaatctctcactccttcaattttattagggaaaaatacttttcccagaagccccgagagagagtgtctcctgaaatgtgatcggcccgcatcatgttacatgctccacctaatccaatcagtggctagatgacataaaattaattaccatgattgttgtaaatgaatcaacattcacctttctaggatttgaaagggggtcattctccttgaacacacaatcccctctaaactggcgttctacaaataaggaagaaggtgggtacatgtaggttttgattaagcaacaacagtatctgccacagtgcttacaagcagacatttaaatcagaattacaccaatattgataaattttcatcaagaagatattttctagattcagctttgatgagctaatttaattttagaaaaatttttctatacatcatatgacattttcatttttttattttcatttttgttttatttaaactattttcatagataccaattcttttccatataaattttatgccacagattgatttcattgatctttttaatgtctatattaaattttattgataatatttgtaggctttgacattattagttttcttcttgagattgttatttatcctaattatcttgggccaaattttgtgggtcagggaattttatgttgactgttcctatcaataatctttattaggaattggataagagactgattatatgtatttctcagtaaatccatgatgaaattgtgacaaattctttttagatatgctaaaaattaatctgttattcagattgtggtattgcagggatcagcaaatcagggtcatgtgagctaaatctggcccgatacttgtagggctgcaagttaaaaatggtctttacagatcaacttttgcaatctatttaataataggcaatactaattttaatcccaattagaagaacattacccacacccccaaaattaatttaattcttcttattaatagacatatattacaaatattatattcgattattactattacactggattttttttttttttgaatcttgctctgttgcccagactagagtgcagtgctgtgatcttggctcactgcaacctccacctcccaggttcaagtgattttcctgcctcagcctcctgagtatctgagattacaggtgcatgccaccactcctggctaatttttgtatttttagtacagacggggtttcaccatgttagccaggctggtcttgaactcctgacctcaagtgatccactcaccttggcctccgaaagtgctgggattacagatgtgagccactgtgcctggccttacattgaattttattaataactatttcatggaaacttgttttctctcctgtcatataaattctacataatattcttgatttttactattgatgcacaaaccctaaaatatttactatcatgtcctttacagaaaatatgtgctaaaccctgctccattgcattgctaacctgattcttctgaacactttccctccccacattaaggctctgcttcattggggttacaaagaacaaatggtgaatagcttagtctgttcaggttttcataacaaaataccataaactgtgtgggttatgaacaacagagatttatttctctattatttattctcaacgatttattaattaacagagattcattctcccagttctggaggctgggaagtccaagatcaaggcaatagcagatttgggtgtggtgagggcccactttctggttcatagatggctatcttctcactatcttctctgtcttctcagaggggagaaagtggtatgggggagctctctggggtctctttcataaagacactaatttcattcataagactcatgactgatcacttcctaaaggccccaccttcaaatatcatcatcatctgggggattaggtttcaacacacaaattttgggagggtcacaaatattcagtccatagcagtgactgaggtccctatgtttttagggttgaaattgtagtctgtcctgcttcagttaggaaaatattaagtggatgagtgtgatcacattgctcagtgataaagggaaatgctctttaaactctaacacattgtgtcaaataaaaacaaaattgacatgagagttttaaaataaaagtcaatttcccctttttagtattaaagtatgatgagtctaacatgttggaaaagccaaaatattgtttcaaagcatcaacatttcaaagaaacatagtcttttgaaacttgggagagtcgagaggacttttactttttcctactgtttcctactgaagttagcttctttttctttcctttaacagatgaggaaaaagaaaataatagagcatccaagccccactccactcctgctactctgcaatggtaagtttccatttttagcaagttctgtcttcagaggatgctcatatcttcttgtctataggataggatatcacttggatattttaacattgtcctgataacttgacattccacaacatgaaatctatttaatttgcagtatatgtaaaatgctcaactagccttagatctagcctggagattggaatttttgtattttattttagggtagatgttttttctgttatccaaacactggcaaggactggattccccatgggtattattaattgattttaatagaatccattattacaatttataataaaaacagaggtctgttgactcttaccaatgaacccttaattcataatgaattacaattgtatataattattttaacattaataacactaacaagagtaatctactagaatggctttctctttaatatttggcattcctgggcttgatgaaatatttaataatgtttaagtggttgcacttgtgtttgatatttacagataaattctcctctaaaagctttatttggaaattatgttgtagctttgaacactagagctctctatgcctgagattcaccctatgaagaatcttggccattgaaggcgattattcccctagcagtgcagccgagcaatatgaaggaattaaggaatgacggggaaggaaagagaaatggggaaaagaaaggaactaaaatccattatatgcacccctccaggctaggcactttatatatatgcctcatttcattctcacaattctgtggagttgctattgttgtgcccatttaactgatgaggaaaataaagctgaaccagttaaaccatttgcctgaatagccacacagccaatcagtggcagaggcaggaagtggctgggtctctttaactgcaaagctcatgcttgcgaagaaaggaaaagaaacatcaggaaggatagagaagagaggacagatcagaaaaggaagcagatgggctttaatgagcaaatcatattagattctctagtctaatccatccagaggtgagaggaaaacaacactgggagaaagcattcaggaacgtaactcaatcttctctaacaagagcctcagcagtcagcttgttttgcttcaagaatagcaaaggttgttttcaagagctctatttccagccttttggcctctttccatcatttgttcctatagactttttctcattgcatttgctgctttttgctttatttaaaattctactttatgtatcagatcaaatctcccccttcacccttctctaagtattatggccatgcaagttcccatagtgccaagacatcgaatgaggcatcgatgtaaaggactctgggagtgggagtttctagacatgcatggaattgacagacttttttttttttttttttttgaggtggagtctcactctgtcgcccaggctggagtgctgtggcgtgattttggctcactgcaacctctactttctgggttcaagtgatcctcttacctcagcctccctactagctgggatcacaggtgcctgccaacatgcccggctaatttttgtgctttttgtagagacagggtttcaccatgttggctaggctggttttgaactcctgacctcaggtgaccctcctgccttggcctgtcaaagtggtgggattacaggtgtaagccaccatgcctggccaacaaacattcttgctttaataacctgaacatgtcatatgtttcagagtaaaaaatttgaaaggaactagaagaaaatcactttgttcacatctatttttctgggattccaggacatctgcctgggagcagtgaggctgtaaatggtgcagtctctgaaatcaaactgtcatggcttaactcccaactctgccacttacaagctgtgaagtcttgggcaaggtccttaacctctctgtgcttcagtctactcacctgtaaaatggggatagcaatagtgtctagctcatagggtagtcatgaagatgaaatgagttgttctatagaaggtgcttgaacagcacctggcatggggtggggctcagtccttccctcagcacactccttccttctgagacccacagggaccacctggagcaggccccgtctcctccctggcataggcacagccagttctccttctatggtacctaattctgcacaaaatatctgtttttctaaataaagggtcacatagatcattccagaagaaatttcaccctccaagtcacaaggtcagacagtgaattttttttaatgataagtctattttcaaagccaaaccaaatctgagaatttgtacatattcgcctattcttatcaaaagacatcaagttgttcaaagaacattaacgtttgctctaattatctttatattatatgtttaagatagaatttcagtcattaactaattcaataaatgtttactgagcacctggtatttgctagctccttgttctaggctctggaaatgcaatggtggataaggtagaccaagaagaggagctgatgacaggggaaaaaggggaaatatctatatctatgtctatatctatctatatctatatctatctatatctatatctatatctatatctatatctatatctatatctatatctattttttgagatggagttttgctcttgttgcccaggctggagtgcaatggcgtgagctcggttcactgtaacctccgcctcttgggttcaagtgattctcctgcttcagcctgccgagtagctgggattacaggcatgcaccaccatacccggctaatattttatttttagtagagacagggtttctccgtgttggtcaggctggtctcaaactctggacctcatgtgatccaccttcctcagcctctcaaagtgctaggattacaggtgtgagccaccgtgcccgtatatatatgtcattaaactaatgacactcagggcacagtggctcacgcctgtaatcccagcactttgagaggctgaagtgggaggatcgcttgaagccaggagctcaagactagcctgggcaatatagtgagaccctgtctctgcaaaaaacaaaaaacttagctgggcatggtggcataagcctgcagtcttacctactctggaggctgagacaggagtatcgcttgagccttggagatcaagactgtagtggcctgattgtgccactgtactcaagcctgggtgacagagcaagaccctgtctctatttaaaaaaacaactaatgattgatagataaacaagtaatgcattagatagtgagaagtgctgtgcagagactttagcttggctaatacgatagtgtctgagaggctatttcaggttgagcagtaagggcaagtttctctgagaaggtgacatttcagtggatacatgtatgacaccatgacagtgtgaaaaccagggacaggggaatgttgcaggtggagagaacagcttctacaaaggccccactgttgcaggtgacctctccagattgagcagagttgtgcctacaggtggtttattagggcatgcgcccagcctccacgcccataggggtgtgagggatgctggaatagacagagggggtgttaggcagtgaagaggttatcacagaggcttcagccaatcctacagggagttctgaggtggagatggccagttaaaaatgatctgaatcaaagcaacggatccagacctttatcccccaaccccattgtccatcactgaatacaggctgcccccagggtgggggtgtaacttgggagaggcggttgccttcatgttttgctgaggatcactccttggaatgattcagcctcccagtagggggaacaatgtctcagtgcctcagggcagtctgggcacactcagcgtccaccactccttcccgggatgggagcaggctgagcttgctgaaggacccacgagaaggtggcccatgtggttggagcatagcacacatggaggagaatgacacaagatgaggtgggagaggcaggcaggggagaggctacataagcagtagggaaaagaaagtaggacattaaacttagataggaacagtcatgcttaaaacggtgtggagaacatgtgacctcctacgtaaagctgcacatgtatcatcttttaaaaaatatggtttcagtataaaaactttctctctcaaaagagagtggatgcaccctccattttacaaggaaaagtgacatgatttacaacgtgtcccctttttgctgtggctgccgtggggttgagagctaaatctgatgcttacagacttttgcaatcacttctttcctttgtctaattttcttcttcttttgctagcttaaaaaaaaacccaggatataagtaaatttaataaatatatttttgctttacttttattttgtttacacaagaaatacatttccttgttaaaaaattaaaaacattataggtaagactccagtccatttctccttgtagttctttgccttctcctcaaaagcaaccctattcagtgagacatgtgtgtgcatgtgtgcacttgtgtgtatacatatgtgtagatatgtattacagacccttccctatgaatttgcacacatatgtatctgtagaagtttctgaagtatggtttttaatttagcattgtctcctttataaaaagcatgcagatgtatcacactaaaaatattgacccgcaacctgttatgctgtattgatccactacttgctttcttccttagtagaatgtcctgaagctacactcatggttcataaagaacaacctcattttaactgcagctcagtgtttagcataagacaatggcagaattaatgttgccatttcccctttttttttttttttttttttgagacagagccttgctctgtcactcaggctggagtgcaatggtgtgatctcggctcactgcaacttccacctcccaggttcaagcaattctcctgcctcagccttctaagaagctgggattacaggcgcgcaccgccacatccagctaatttttgtattttggtagagatggggttttaccatgttggccaggctggttttgaactcctgacctcaagtgatccaccggcctcagcctcccaaagtgttgggattacaggcatgagccaccccacccggcgccacttcccttttgatgaacatttaagttttgttcaaatctcatctttgccattacaagtagggcctcacggaacatcttcgtgtgtgcccccttggacaccgtgggagtgtttcttcatgtctgtatcaagaaacagaattgctccattaacacttaaagtgttgatgggattgcaaaattacccatcaaatggctttaccattttatatcttcatctgcagtgcaaaatacttacaaaacaaaacaggaacctaatgctaggacaagcatctcattctctgaggcatttatgtccttcatgctgtgccctctctccagcggcagtggccagcccctgaggacagagaggagggcaggcccaggaaaggacactggccgcaccactaaggcgcccgccacccgcctgacagtgtcgagctctcctgggacatttggcttgttattggaattgggttaggagctatttgcttctccttcttccccttccttgccacaaaccccctccccctccccctagaacaaataacaccgctctaagaacaaataatacagcagccaagcagcctaaaataattggggacacgtgatctggaggcaactcccagcagaaaacaggcaaatattgtcaaatgccttctgccaaacactttccagcatcctcggtcacgagggttagtaaatcccaactcactggggatggtgagcgctgctggaatcccggccgcacaataacctctattcatgcagagaatttcgaaatggaaagcagcctgttccgcagtcccggcctacttgctgccaacacatgccccctccgtgccccgccctcgcccgccacccttgccgcccttacccagagctccttgtacgccttctgggtggggacgttttcccttccagcaatttactgaagaaatgaggctcttccaaaaaggaggacagaagatcaaattgtcactttcgggggggattggggggagattttcctttcttttgaaaaaaattaaattgaggacttgggtggttgacaagctatcaatattccaaattaatatgaaacaaaagaaatttataatttctctttagaatgttctggaaggtcataggtaagacattgggtttggcactgttccaaagaagaaatacattgacattttagaccagatcacagctgctagatcagactcattggatgtaaccgataactgacattttgcacccttttgtgacttgattcttactcaacagtgacagaacattgctttcataatgtgagttaggtaacatggttctaaaaagggaggctgaacacttttagctctgaacacaaccagtgttgatagataatgccactagatgtgactgtgtccctccggatgacctcagctacagatggagaaaggtcagttaagctggacaacccaatgccaagggcagaaatttctcagggaatgagatgctgtgttgtggaaccacaactttttttaaaaaaagtattttgtgctgtgggtaaatgtgtcaaatggtaaagccatttgacgggcaattttgcaatccattagcatttgaagcacatgcagccagcagctgtgcttcttgatgctggcagggagaaacactcccacacaggtgtgtaagggggcacatacgaagatgttctgcggggccttattcataatggcaaagtgcagtagagatgagtagagtactgggtataggtggaaagggaccactgaggaggtagcttctggtaggggatggtgccaaaatcacctcagctactgtccaggacaaccagagctctgggctgcaaacctgtagcctaggccccaaaagaagcattcggaaccaaatggaaattgcaacactgtgcttaatacattgcctagttttatccaaaaaaaaaaaaaaaaaaaaaaaaaaaagaggggacttgaataaccaaaaactgagctgagagattccagaagctacctaagcccaggccttactagaacactaattcagtaggttgtaggtcaaacccagcgtaggaattggatgactactgttctggtccagtttagacattacaatggcaggaataaatctctgattcagtccattgccccacatcagccaaacctacaggttcagcaatcacccgtgggatgccaggcttgtcaggtgatgtcactgctgagcacacctaatcctcatgaaaatcctgtagagaaggcaggacagctacctgtatttaaagaggaggaaaccaaggtagtctctttctacacaaagagggggacattcctgactccccagggaaatcctcaacaacaaggaagctgggtcagctgaagtcccctgagaaatgtcagtgtccacacaaatgcatgtttctgattggctcgtctacttggcagcaaagcatggcttaatggttgtgtaatgaaatagattgtttttttgtttgttttattttgctttggagttttctagacttagcctcagtcctaaccagagcctgtatgagccaaagcccactgttttctattcatttgctgtctggtggtgttatctccctagctcccatcttccttctggtaaactgtcagtttcttaaaggctggggcaagagtagcatcttcttgttcatggctgtattctacagtgcctggcatatagtaggtgctcaataaatgtattctgactaaccaaatgaatgtcagtctctggcacatagtgagaactttagaggcatcatacctgagttcatactttttaagcctagcttttcccagcagagtcgctgtggacaagccactttacttccttggccctccatttcttcctctatgtcctagggcatagtgtttactcatcttgtgggggtagtgatagccaatatgaacatccctagcgcagggtaggcacttgaaaatataaatcaaatatattaatattaaccatgcttttcctttaactacccagatattaagattaataaaataccagaatcccttgacctgtgcaaaagcctgccttccttcttattggcctttcctcctttcccctccttcctcctgcagtgtttactgactgtgttcaggacacagtgctaggaactatgttaacatcaataggaatttggtttgatccctgccatcaaaggactttcagtttaagatacaaaacattacctgaatattccacaatattgtaaaataatgctaattgttactctttattgagtgtcccccacaataaagggcctcaggctgtgcatggattcttgtctagtcctcacagcaagcttgggagatggtacagtttctctcattttacagatgaaggaagtgagagagttcaagtaacgtgccccaggctatatgcttgtaagtggtggaggcaggattcaaagtcagtgatctcaaactctaaaaccagtgctggctcctgatgaagctatttgagccataagctatgaggaaccatggccatccctgggaagtagtgagagctttacaagcagaggatgtggcttttcctacagacataacagcagctggcatttagaccactgcagcactctacatgttattgaatgaataaatgaatttggcagggaggaaaggatgaagaagtggttagcagatggggttgagtgtgcactgaacatagttccatggaagagaaatgtgagttgcgccttgatgcgtggaacacggtggaggaggtcatcccctgcggtaggaaggtgatggatcgtgtgtgtgggtggaaggtgacaaggtgtgtctcaggagcaggaaacgatccagttggctggaaagaggtatacgtgtgggaaagcaggacggaaaaggagccaggggccttggatgccacggtcaggaatccagacttttgtggagagggaacagggagccgttgacgggtgtagactactgtcttgtcctgattgcttagcaagggttttttttttttctacatagtttacagtctcagatctctgtgacaacttcagtgataagttaaaatagttaatatttttaaaaatcctgttgtcttgtaaagtctgggctttctgtaaaaaaaaaaaatcctgtggggttttttttttttttttttggtaaaagagaatgaaaaagtttctgttcttgacatgtgtgcaagaacttgaggagtgggcactttgaactgacgcagagcgacctttcctaagaatacatcgatcatgctgcccccatgctataaaacatctaatcagtttaaaagatctctgcatatacatataagaaatcacaggtttaaaatgaggacagtgggaaatgatgccaggtgccgaaacatttgcttttcattgtaaagtgctgatacaaagcttcctccatgtgccttaggaggccacatgctgaaaccttgtgaggaagtcttcttaaaaatatataactcagataatgactcatgttagctagcagactgagctcattatctctccataataggataggctcaattcaaatataatcaagttgttaaatagaagataaggaaaatggaagaagtgggaatttttttgtgatcattaaaaaaaacccaggtataatggagcattgttcaccatgtcagactaatgatgtcctctaaaagagaggaggaaacgagaaaatttcatcagatatgaagaagaataattaactgcctttctttctgccatgctttggtcagggaagtggacattccaattagcaactttagtagataggcagaacctctggttttgggcaaaggtgtcatgatgctattcctgtagaaacttatcaagcatcaaaggggcccttccatgccaattacatccatttgttcatagagcttattaaaatgcttcatagttataagccacctagttactttgaggctcagaagctccggaaagaggaacaaaacgtgggctgaaatgtagtaatttaggaggctctggcctttgacaggtaactgtttaattagcccagcctgtgtgaaccatgacttacacccatctgatttgaatagtttgttgctgctatgggttcatttgatgtgatgtttcttaaccatgatcttgtattttaatcttgacctcttggccagatttagtaagcacacaagccacaagaacagcaaatggaaactgaggcacaaggagcttaaataaagtaacttacttagaaactcatgctgtttaatgctgcatttgaaagcatgattttcacccttaactgtcctctccttctgcatttctggtagtggagaatggagccccccattcatccattctgcccagttaggaacctgagggtttgcttggttactcctgtcctcctcacatctggcagcatgaggcccacaccctaagtgttacctctgcccccacaaccattgcttcagttcatgccccatcatttcctgccagaactattatagtagctcctaattggtctcctgtgttcattcattcattcaacaagtcctaattaatcagccactatgtgccaggctttgatcgtcctcctgggccacctcccctagaggtacagagcaaactttccaaagaatgcattgatcatgccactcccatgctttaaaaaatctaattggttttaaaggatttctatcaatttaaataatcatatgcaagatgaattctgaatggtttgaaatacacatttgtttagtgtgttcatggatttttttttagccaaaataaattctaggaagccattagcaaaaataagcaaaaagggatacttttatcttccccacagcttgtcatacacaaaattgcagttgcccaaattgttcatgtgtatgcatgagactggaaaatgttccactacaagtgttgaagtcaaatctcttaaaaattgcttaatggaactctcaaaagtcaaagatggccaggcgctgtggctcatgcctgtaatcccagcactttgggaggctgaggtgggaggatcacttgaggtcaggagttcgagaccagcctggccaacatggagaaaccctatctttactaaaaatacaaaaattagccaggtgtgggacacctgtagtcccagctactcaggaaactgaggcaggagaattgcttgaaccggggaggcggaggttgcggtgagccgagatgtcgccatttcactccagcctgggtgacagagcgaaactctgtctcaaaagaaaaaaaaaaagtctaagatgatacctatgagacaggtgttttgttgttgttttgttgtttgacattcttttattatactcaagccattcctggcaaatagaacgtattaagctttaaattaatgtcagttattgttgttactgatgatattattattattatcatcattattattcctatagcatcccggaagcactcaggtcttcccgactcctttgagtctttgtttctttcagtcctcctgagtacaattctaccaccttcttctgaaaataacatttttatagtaactcttgaactccaagtgggtgctaaattcttaagccaaatcatatccatttgtgtggcatttaaagactccctccacctcccatagttcttccctttagataccctttccttctctctttactcagatcagcatctccatcattaaaagcacatggcactgtctcccatccttgctgttctacttgcctggaacctccctccctcccccaactaccgtggcagaataccagagagatttggaatgagacaaaccctcctatttactagctgcatgactgggcaaatgagttacaccctctgagcctcagattcctatcctgaaacatatgtataaatacctacctcatgccatacggttattgtgaggtcaaatgagaccatggatacccagtgcccagcacctagtaagagctcaacagatgctaactgttgttgttacacaatcctaaacccaactcttctatgaaactttaattatctactctcatctacacatcaatctctctgttttcccaccttcaactgtacctatggtcaggagtttatagtaattaaatattatttcttgtgcatatgtctccccaaatagactgcaaagttaactaggacatagatcatgtcttatgccaacacaagtgcctacaggagccagacaaggaacagaaaatagacagggtacaaagaaatagggaggagtgaggactctggccaacttcagggcacatgtagctctggccaattgttgtcgtgcgggaatatgggtccagtgttgccagatctcagctttttcaaaagaagccagaaatccagattcttatgtgcaatgtcctgaattttaaaaattgggccaacactgttcaggccaaaacaaagcatgtctgtgagaccccagtttgagaaagctgtcttattcagatggcccctacaagtttgtacgcgagctggttatttggacctctgaactcacttttatagagaaacaatgccgcgaatggcagttaggggtccaggctaacctcccaggctgattttcattcatactggacctgaaacttaggacagtcctaagaaacctattctttatgtgaaacccttttcccactggaaaacacacttagaattccaatttatgatgtcaaagacatacatcagaatgtaagcctgttcaggacaggaccattgttttgttcaccactgtttccttaatgtctagaacattgcctggcacttagtaaatatttgttgagttaaaggttatctgtgtctttgtccatctgtctaccattaatctgttcactgtatgcaagcatggactatcttgctcactgtgatatccccagcgcctggcaggtgataagatcaataaatatttgttgaatgaataaatgactgaaataatctatccataagacacttactgagcccctactgtgtgccaaggaatatgctggacctcaatgatgcagaattgactcagacactatcccagcctcaaggaatttgatcacctagaaaggattacatcaactctttctgggaacatttctaaaaactatcccaagttactcaatgttccccatcccagaagcgcgggaagtagatgagatgatcggggactattcagcaccaggttttgtcttggtgctgacaggtctgtgtccctagggttgtattccccctctgtggggtttgggtatgaaatgattgaactgatgttcttgcaatcacatgttggaataagttgagcgagtgctgccctttcaagtgggcaccttggggggccgtgtcctcattccacttcacttacgacagcgctgggccacttctttggcaaatgctctcagagggagttttgaagccacttgaggacatttatttcatcactttggaattatgccttatttttgaccaaaaaattgggggtgggggatggttttccagtcactttatcccccaaacttgcttccaaataactttgggttgtttcctaaaatctagttaatgatcaaaggagaaatgtttcctgttggtgcattgatttagcagtaggtgccccaggcttcgaaggcatgaccctaagagaagttcccaaattgtcttgtgccacagcagttttcttgggaaaggtatttaactttccagagtgcctaggacaatggaggcaagatttatttggatgcctacattctggtgtttgggttaaagaataataaattttttaaaccctgtatctaatttttgtttatatccccaatatttagcacacggtcaggacatatagtgcccaaaaatgttttctggagaggaagaacgaatcatgaggaggtctgacgtcttctcagtgcttcccatgcacgtgccaggcaccatgcggatgcttgtcacacgttacctcgtctgatcattataaccactttaggaggcacttacaattcaatcccaccaaaaggaaactgaggcctgagcttaagtaacttgcccaaggtcaccaagccagcaagtgacaaggctgggatgtaaacccagttgtagaaaatctctcctacagaatccctaatggagactcactaagaaggtgatgggtatagaatcattattcctagcacagcagaggagaagaggattctaaagtaatcatggggccaacttcctcctctggtcatgagacctcccttcagtcagcagatcagtgtctgtacagctatacaggcctctcctggggcattggttttcccagacaatccccctccatagcatttgtcagccaaggagctccaagatgttgacacatcctccttgggcttttagctgttacaaatggctcctcaagttggtctgtggttccattcctggctgattggggcacccacaagaccctatgtagtttttggagtttgcatgtatctgatctagccagaacaaggccaggtcaatgacagtacagagtagaggatctgggaatttgggctgaaaaagtagcctggtgtcatacccaaaggggccaggattctgacactgccaagccactaatgccaggcatgaccttgggcagcttgctttgtcttcctgggccccagcttctccacctgtagaaagaacgttatttctaaggactgcccatctctggaggactagaaagaacagaccgttcttgcttggggaaggtaacacattttttgctcattgggcgtttatttccctaggctggaggagaactatgagattgcagagggggtctgcatccctcgcagtgccctctatatgcattacctggatttctgcgagaagaatgatacccaacctgtcaatgctgccagctttggaaaggtgagtccagcctcatcaggcttgtcctccctaccaccccaactttaagtaatttatgcacagttttaaagcattttagttattttttttaagttatcaaagtacttacttactttggtactttgacaacttcaacttcactgtaatactttgctatcaaaatttcaaacaattcaaaaacattgtaaagtaagaaattcaatgtctcacttgaatttcctcagtacttaattttcatgaagtcacttattttctctgagaggcaaatattgaactcacaagtgtgttacatggatgtcaatcagcctgggacaggcaacctgcttggcttagtcatgtggatgcctggagaaactggaaatggccctgtatccttagattggaggtgtgggagtcctctgcaaagagtggtactatttgcattatcactacagtccagactgttctctttccaccttataaaaaaaatgcaatccacatttagagctatgtctacaaaaaattgttagcagtgatcattcccatttaataggccaaggaaagctgttggggcattctttaagactgatcatttatttatttgatggctacaccaaaaaaatacccaatttgagtcaatacatctaaaccttcctccttttgttagcttcctttttctatgtgtaattttttctgcatctgctaacaaaaataggcttgttctgtaccatgattttttatcagttttctgagtgcaggaatacgaagggctgaaatggcagaaagaggtcagtgtatgagtttcaggaattcccttttcagatccccaaaagataaatcatcagtaggaaaagacaaagagccgtgttagggctgagccagccaccctggagagcccaaaaatggagtggctgagaaatggctccattcaataaatgggaggatgctctgtgatgacttggggaggaaaaaacatttttgtgttgattaacatgatttctccaaagtgaaagggatgtttttttaaaagtcagtggagaaactacctttggctatttctttcattcatttcttcaatccttcagtattggtagagactggctgtgtggcaggccctgtgttaagtagtggcagtggggacccagaaaggaactcagtatggctctgctatggaggtgcccctcagcaggtgggagaagggagagcacacaaggtggatgtgtatgctaccagagcttggtcaggagtttgcggtcctggaatattcagtggcacctacaaacccctcgcagaggccacagtggaaagcccagatgaggcctcttacatacaggttggggacaggttgggtgaaccaaaagaccaagaatcctgactttcctggacttattatctaacctctctaagcctcagctgccccagcttcctcagggggatgttgcaagagtcaactgagatgatgtcagtggatgatggaaggtactgtttactcagtcatccaataactcagacatttattaagcacctaccatgtgcgattacaactgttgctgttatgaattctgcatgagatgtctgtgcatggacataaacagacatttgttagcttatattctgcaaaacaaataaaaaccctcaccacttgtagaaactccaatttgcctgcacaagaagcctctattctcttttcctcaactacttttgtaaccctattagcttgtggttttcttgacctcctgatctaggtaaaatcagtttaagcgcacgccttcacctcagcaccccagtcccattttcaatttaagtctcaagcctgccccaagacttcagcaaatctcaaggcatttgcattctcagggtcaccttgacttgagactcttccttctggtcattagccatgtgtggctgtttaacttaaacaaaataataacttcagtacactagcagttgcattaaccacatttcaaatactcaagagccacatgtgactagaagctaccatattgggcagtgcagaatgaaacgttcccagcatcacagaaagttctatcagagagtcctgtgttatactgcagtgagccaaggaggaaactcagtacccactttgcttttcacaagacagcccacaggaagcctctgtgatcctagtagagtgagatttgtaggagaggtttacatcccaaacagggttaacatcccaaacagggtcctacggaacagacatcccccacttcaaaatgctcttcatcctcttcaccacagtgggggcttactggccctgcccctgatggttcccaaagctagtcccagtgcttctccaccctgctgtctcccttttctcctcttccatctcccttctcctcattctcctctccccttcctccttgagacaccccccaccaaatgtctctcttctgcgatctttggtttctgctgacatctatgcccatagaggtacctcactcaccccaaatggcatttcaaaatatttttctgaacaatacatttcctccctaagaattatagtgccagctgcttccaaaatagtcatttaaaaaacatccgaactccatcttatcttcagccttaaaacaaggaaatactctaatggcattaagaacacaaatgcaaatgctctgtgcagctgccttgccatcagtttcaaatggactgggcattggagctgtccttccagccacagaggacaggagctgcctgctaagggtttccacactgagcttgctggattgaaatcccagacacatttgcctttcctgaggactccagcatgctgcagctgccatctccttgagagaaagggactagttgttctgtgaaactttgagatgaaatcgtggacagtcttcctttgagcagatccatccaaacttacaattcattgatgaacttttaacttagagcaggcgaggtttaatatttcagcttagcttttggagaacaaatacattggtagtagtctctacccagtttgcaagtgggctgaggcaacacagacatcaatgctgaagctgtcccccagggacaaccagggtgacctggttgggataccgttcttcataaagtgggtggcagccattgcttcgctgcaagtaagatctgaaatgtaaatcctctttccaagtctgtggccaagccccaaaaacaccggcttccagtaatgctgtattgactttgggtcccagaattaatttagggagtatagagaatgtgaaagcttctagctgaactggtcttgtgcctgctttcgctgttaagggtaatgaaagttcacccaacttggagtcactgaacttttctgagctcatatttccttatctttagacaggaataatccctcacaaaactagggataaaatgagacagtgcttatgagggcgttttttgaaactgtcaagtgctctacccatcaaataaatcatcattctctaaatgatggcctcattccatctcacctcccatccttccttaccatgctttatttttctttatagcatttatcatgacttgaaatagatatatttatacatttatatagtatagttttctctctatatatagatatatagctaactttccctactgctactctatgcttgtcaaatatctatatctatgtatacacctaccatgtgagtatacagaagcattatatatacgtaatgattttgttttgtctgtctcctctagaatgaaagctctatgaggactttctgttcattatgcatcccctacacccagaacaatgcctggcacagaataagccctcagatatttgttacatgttgtatgatttatatttacattacttgtcagggaccatgtgaatcacttttacgtatgtgaactcgtttaaccttcatgataataaccctatgaaactggtgttgtatccattttccattagcccatttactgagtagaaatgaacttattgaggtacacatggaaactagctgtatttttacttactttgaagaatcgccttcaaagttctccacccaactcttcctgctctgatgatgatgtcttcagaggaaatcccacagcatctggccatgttcacccatcacatcagtcttggctgaataattacagctcattctcagctattaaaaagtgtagttcagtccaatttaaaacttcaatctcacatctaagtcagaccttcttcctccttgtggctcagaatttgctctgggaaagaggggtaggatcagctttttctccttccttttctggctcctccagggttggggttgggagacagtgggggaggaaaggcaacaagagtcatttgacaaactggtgctcactgggggcttctcctagctataagtgccttctgctatgactgtcacccaaatgctggggccaggggtcctgtcataggttttgggggagccactgtggatctctgtccacattagctgagagatgtgctctctagccaacctcctaccacctccactcacaggctgctttggcccctcgggtaactgaggagtccctctgtagctctgttattgtgttggaagcttctggccaactcactgcacaccgagtgttacaccctgattcttagagatgcccagaggagccccaaaaagcagaactggcagataggacaggctgaactcaatgaagcataaacaaaaaatagctttgctttgttccaagtttgtctatggcccacttccttccctgacccctgattgttgcatggcagatttaatagcttttgggttattgattataagaacaagcatcttctcaataatttatactcttttttagatgttaaaagtccagtccagtccagttcttgaatttaaaactgcagtctcacatccacttcaaaactcctccctagcccagctggggtctggctatctgtggcttggggacccacagtgaggaagggaagagtgtgatctgatcttctcctttccctgaccattccctcctgctcctggtccctttaggtgtgttagactgagaaaaaatactttcagaatataactctagctctccagggaaacagtgaaataaatttttagagaacaacagaactataaattgaaacaaacatacggtaatagggatcacaattggcatgctcatgacgttgtccaagcttattaataggcaattttttaacagatggtagaagtgtctagctctgtctaacttagaatgcaacattcagttttcatacgattaaagagcaaacatttatgtagggctttctgtatacctggtactgttctaagcactttacatatatcaaccgtgtctagtcctctaaataactctatgaagtagatactgttattgttcccattccatggatggcaaactgagtcccagagaagctggatgatttgccaagttcacacagccagtaagtggtggactcaggatgtgaaccaaggaaatatggccccagagctcatgcccttagccacctcatttacacaggatgagttatttcagggttaggctaggtatgtgtggaggcaggttttgtgcacacacttgtccttttgactttgttgcagtcattagtagtcatctggtgatctcctaggtgatggaattttggagagaagtctcagcctctgtgtatctcagggatcaagtgtgctgatcactgcagttgagaaatgctttcccaaatcttcccagctggggtgttctgggtactgtgaactctggggtactgagtactaactccctcagcacccgggttcatccatttatctgatattcatttatctcatgtctgtgtggacccagccccgtgctggaagatgggatacagagtgaagtctgcctccaaggagaaggccctgtagaggagatatatacacatgagtgactgcaaaaccagatggcaaatgcaattcctgagtatgaatgcaagattggaagggcacaggattagagggatgcttcctccttgtaggggtgaggggcagcctgagaaccaggctggttgtggaaaagctccaggcactgagcatccccctctctcagcccacaaccctggaaggtccatggaagctaaagtgggtgttttaatttcaccagaaacctccttctcctgcttgaccacttgtctttcagaaactctaataaaacaaaaactctacccacacaaagatggagcatcactgcatttggccaacaagctaagccttttcagaaagaacaactgagcctcagatttttgagaaaagagaacatctctagcctacaaatgagttgctttccaagcatttgtaagctgcatttcagtagagcagaggtcctcaacccctggtctgtggactggtactagtctgtggtctgttaggaactgggccacacagcaggaggtgagtgggtgggcgagtgagcgagcattacctcctgagctccacctcctgtcagatcagtggtggcattagattttcacaggagtgagaaccctattgtgaactgcgcttgtgagggatctaggttgtgttttccttatgaaaatctaatgcctgatgatctgaggtggaacagtttcatcctgaaaccattccttcaacctgtccaagggaaaattgtcttccatgaaaccagtccctggtaccaaacaggttggggactgctgcagtagaggccacaaagtgaaagaatgtcttcttcaactcacacttattgagggcccaccatgtgctgtagcccatggaatttccaataatgtcaggttttgagccctgaacttgaggatctttcacccttactcaccatgtgatgatgggcaggtccttttccctctctgaacctcacttcctccatctatcaaatggggaagttagtctacaagcatatgaggatcttaccgtattagcccaaaacacttttcaactagaaatcataaaatagctaacactgactctatgccagttcctgggcaagcccttttcatggattatctcatttaatcctcgcatactctgtgaatgagatgctgtgatctgggttttttgtttgtgcatttaaaactttttaaaagagaaattttagtttgacagcaaagaataaattgtacagagatttctcatataccccgtccctacacttgcccagcctcccccattaacaacatccctcaccagagtagtacatttgttacaactgatgaacctacattcacacatcatcacccaaagtccatagtttatattagaattcactcttggtgaattcactcacattggtgaattcactcacatactgtgagtttggacaaatgtataataacatgtatccattgttttggtatcatgcagagtattttcactgccctaaaaatcccctgttctctgcctagtcctctctccctgtcccctaacccctggtaactactgatctttttacagtctctagttttgccttctccagaatgtcatatagctggaatcgtacagtatgtagccttttcagattggcctctttccattcataatatgcatttaggtttcctccatgtcttttgtggcttgacagcacatttctttttagtgctgaataatatttcattgtctggaggtaccatggtttatttatccacctacttactgaaggatattttggtttcttcccattttggcaattatgaatacagctgctataaatatgcatgtgcaggtttttgtatggacataagttttcaactcctttgggtaaataccaagaagggcaattgctagattgtatggtaagagtttatttagttttgtaataaactgccaaactgtcttccaaagtggctgtaccattttgcattcccacagcaataaatgagagttcctgttgctctacatcctcaccagcatttggtgttgtcagtgttccaggttttggccattctaataggtatgtagtggtatgtcgttgttttaatttgcatttccctgataacatgtgatgtggagcatcttttcatatgcttatttgccatctgtatatctctttggtgaggtgtttgttaagtaaggtctttggtccatcttttaattgggttgtttgttttcttattgtttttaaagagttatttgtatcttttgagcaacaatcctttattagatgtgtctcttgcaaatattttctcccagcctgtggcttatcttctcattctcttgacattgtctttcacagagcataaaattttaattttaatgaaatccagcttatcaattatctctttcacggattgtgcctttggtgttttatctaaaaagtcatcatcatacccaaggtcatctaagtttccttctatgttgtcttctaggtgttttacagttttgtgttttacttagatctatgatccattttgagttaatttttgtgatgggtataaggtctgtatctagattcactttttttgcatgtgtatattcagttgttccagcaccattttgtttaaaagattatctttacttcatttattgcctttgatcctttgtcaaaggtcagttgactatatttatgtgggtctgtttctggactgtctattgtgttttgttgttctatttgtctattcttttcccaataccatactgtcttgattacagtagctttattgtacatcttgaatatgggtggaatcaatccaccaattttgttcttcttcaatatcaggctgactattctgggtctttagcctttccatagaaacattagaatcaatttattgattgccagaaaataacttgctgggattctgattgagattgtattgaatctgttgatcaagatgggaataactgacatattggcaatattgcatcttcctatccatgattatggaatctctatttttatctagttcttctttgatttagttcatcagaattttgtggttttcctcgtgtagctcttatacatagcttgttagatttctacataagtatgtcattttgaggggatgctaacataaatagtattgtgttttcaacgtcaaataccacttgtttattactggtatataggaaagtgattgacttctgtatattagccttgtatcttgcaaccttgcttattagttccaggagatttttttttcttttgtagaatcttttggattttctacttggacaattatgtcatctttgaacaaagagttttatttctgccttctcaatctacatgcattttatttccttttcttgtcttattgcattggctaatgcagtatgatgttgaaaaggagtggtgagaggagtggtgagacatccttggcttggtcctcatcatagtgggaaaactttgagtttcttatcattaagtataatgttagctgtaggttttttgtagatattctttatcaaattgaagaaattaccctttattcctagtttgcagaaagcgttttttttttttcaaatcgtgagtgggtgtttcaatttgccaaatactttttgtgcatctgttgatatgatcatataattttttagcttgttgatgtgatagattacattaattgatttttgaatgtcaaaccagccttgtatatctgggataaatcccacttggttatggtgtataattacttttatacatcattggattcaatttgcaaatattctgttaagaatttttgcatctatgtttatgggaaattggtgtgtaactttttttaatgccttttatctgattttggtactaggtaacagctgacttcatagaaagagttaggaagtagtccctctgcttctgtcctctgaaagagattgtaaagaattgacaaaatttcttctataaatgtttggtagaatttaccagtgcacccatctgaacctggtgctttctgttttggaagattattaattattgattcaatatacttaatagatatagacctattctgtctgtttctttctgtgtgagttttggcaaatcaaatctttcaagaaactagtccatttcatctagattatcgaatctgtgggcatagagttatttatagtattcctttattatccttataatgtctataagatctgtagtggtgtctcctccttcaatactaatattactaatttgggtctgctctcttttttctttgttatgcttgctagaggcctatcaattttagtgatcttttcaaaggactggcttttgattttattgattttctttattgatttcctgttttcaatttcattgacttctgctctaattcttattgtatcttcttcttacttcagattaaattcactcttctttttccagtttcctaaggtggaaacttagattattgattttatatcttttccaatatatgcattcagtgtgataaattttcctctactcactgctttcatttcatctcacaaattttaatgttgcattttcattttcatttggttcaaatatttttatttctctgagatttcttctttgctccatgagttatgtagaattgttgttttatttccacacattcaaggattttctagttatctttctgttattgaatgatagcttaattctactgtggcctgagagcagacattatatgatttttgttttatgacccagaatgtgatctatcttgatgaatgtgccatataagtttgagaatatatattctgctatttttggatgaagttgtctattaatgtcaattatatttaattgattcatgtccttactgatcttctgccttactgatttccatttctgatagaggggtattgaagtttccaacagtgatactggattcatcaatttttccttgcagttctattagttttggccttatatagtttgatgctgtcttgttaggcacatgtatattaagaatcattgtgtcttcttggagattgatacctttataattatataatgcccttctttatccttgataactttctttgctttgaagtatgctccatatgaaattaatatagttattcctgtttcttttgattagtattatcatagtatatttttctccatccatttacttttaatctacatggatctttatatttaaagtgggtttcttatagacaacatatagttggatcttgttttttgaactgcttaggcaatctttgtcttttaattgatgcatttagaccatgatcttcgaagtaattattgataaaattggataatatttaccatatttgttactgttttctatttgttgcccttgttatttgttacgatttttgtcttccactcttctgctgccctttgcagttttaattgagcatttcatatcattccattttttctcctttattagcatatgttatactttaacataaaaaaaccttttaaatggccttcctataatttgcaatatatatttacaactaattcaagcccacttttaaataatgctatgccacttcacaagaagggcgagcaccttataatgagaaaatcataacttttgtgccctctgtaaaaaaaaacatgcacacatacttatgtatgtgttttaattgatatacacatataatcaagtactttgttgccattattattttgaataaactgtcatctgttagatcaattaaaaaacaagaaaaataagtttttattttacttcacttattccttcttcagtcctcttcctttctttgtgtaaatctgagtttctgacctatatcaatttccttctccctaaagaatttcttttaacatttcttgcaagtcaggtttactgaaaacaaattcccttaatttttgtttgtctgagatagtctctactactacttcagttttgaaggataatttctagtgtacagaaacttaggttggtaggttttttcctctcaatactttaaatatttcatttcactctcttcttgtttacatgatttccaagcagaagtcagaagatagtcttgtctttgtcctatataggtaacatgggttgtttttctctctggcttttttcaggatgtttttcgttatctttgattttctatagtttgaaaatgatataccttgatgttgttttcctgtggtttggctttttgttgtttatttgacatttatcctgcttggtgttctcttagctttctgaatctgtgatttggtgtctgacattaatttgaggaaattctcagtcatttttgtttcacatatttctttgcttcttttctctctttttttctctttctgatattcttattatgtgtatttacatcttttgtaattgccccctagtccttggatgttctgttcggtttttcagtctttgttctcttcgctttttagtttttgaagtttctgttgatatctacacaagctcagagagtcttcagctgtgtctagtcacctgcaaatccatcaaagtcactcttaatttctgttacagtgtttttgatctttagcatttctttttggttctttcttaggatttctatctctctgctcacatggtccatctgttcttgcaggctgtctaatctatcaattagaacccttagcaaattgatcacagttgttttaaattcctggtctgataattctgacatccttgccttgtctggttctgagccttgctgtttctttaaattgtgttttagcatgccttgtaattctttcttggtggccgaacatgatatgccaggtaaaaaaggaattgctgtaaatcacctttagtcatatggtggtaaggcgtgttgttggtgggggaagcaatctattgtcctgtgattaggtctcaatcctttagtaagcctatgcctctggactgtgaactttactacaagtgtttctccattttttccctcccctcttagatgtcataggatggctaaagttggctagaattggatatttcccttctttcacatggaaggttagaggggactggtgttgggttatttcccttctccgcatggaaggctagagctgactggagttgggtatttcccttctcccaagtcagttaggctctgataataccccagcagattaggctctggttaactagcttctcctgaaagcaggccttgttaagaagaacagagtgctccagcgtatttcaaaatggttcctttactccttcccctgccggaagcgtgagggacttttgctctgatatttactgtgggaacctggtcaagctcctagaggtacatctctcaatattgtgtgggttcccctatgattgggtctccctagagttattttttaactctcagccttgtctgcattaagccttcacaacttgtcaattacaattcaggtgttcctaccacagtactgggtcctgaggcagttcccactcctgagtctctgctccagggagccacgattccctgtatttacccgtctctccaatcttgagggcagcagtttgctctgtgtcctcccctctcttaagaacccaagaagaattgttgatttttcagtttgttttgctttttacttgttaggatggagtggtgacttcaaagcttcttatatacagaaaaccagaaactggaagtcaaaatgctgtttttattcccatttaaagatgaggtagttgtctccagggcctgtgttgtcaatatcggatttctgatcaatgcaaaggagcaaaacactggagcattctctataaagtcgatcctaggtggaaaccagaaggtctctgagttattacaaaaattggggctgtggggaaagatgtcccccccatgcctcaatagtggcttaaataaattagtggtcttacttttctcacataaactaagtctagaggaaggtaacccagctgcagttgggcagctccttaaaagcatcagagacccagtttctttctgtctttgtgctctgccctttctagcagatggcttccagtttctatatcacctcatggtccaaaatgactgctagactccaaaaactatcttccaggaaagaagtagaaaaaaatggggtaagggaagaaaggtcaaagctcccagttcagtcagccctctttagactctttcccagagctcagcccagtgattttcccttacatctcattggctgcctttggctatcagggaggcaagaaaatgtggtccactctatcctggaataaaaactacggtttgagccaggtgcaatggtgcaggctcatagtcccagctactcaggcacgaggctgaggtgagaggatcacttgagctcctgagttcgagtccagcctgggcaacacagcgagagcccctcttaaaaaaattttttaaacttaaataataattaggatttatttaccttggactaaggatgaaggggaaaaaagaaaaaataattagggtttagtggggaaggagtaggcaactagccattttatccacataagggtgtttcacacatccatgcatccttgtatatgctacaactatgaaatggaactcaggatcctggaagagtataggttattctctcaaattatgagctcatgggaagtaacatgggtggtacaatgtgatcacttaagactgtggagggtgacatgattcatggtcagcaatttgctgaacttttcaggaaaaggctggcttatggataggcactagatagttgtgatatagtgtaatttgaatatgtggagaggccatttggcctcaaaaatataccttctgaaataaaggcttaatgatgtcttaaattcctcaatcccacttatttaagtctgtaaaaatgcaactagaacaggataagatcattcattaatacttatcacttactaacacttcagtatgtatgagtttaatctattaaggagactcagagatcagttgatgcaatcccttcactttccagatgtggaaattaaagctcagagggactgagtggttttccccagttcctacatttggtggcaggtctccccctcccccacactggatccagtggtggggctgagagtgtggaagagacaccagtaagaggtagagagactggagaaagggaagctgaggtgacagatgtgcttgtatgaattaaatttatttatatcctgcattttttcagtgaggacatgggtaattggcagtttgggttgtgggtggctcatccttgaagatttggctcctttctcctcgctgaccatccttgggcaatggggaaaaaagccaagtgtgttctggggacctgtgcttcatcagctgcacttacctgcattggagagaacagagacttcctcatttacacggtggccctcttcttctagtcccaccagtctgcccaccctcctcccatcctgacgtggggtcacttgcacacccctgaactgacacagcagaagatgagggcactcttgaggcatctttaggatccttcaaagatggtctttttccagttctcaaaggaaaaaaaaatacgtacatagacagactttccttctacttttaattcttgtatatatttttcttaatatttttgaatctgctgtggggcatccatgacagaatgtctgatttcacaccaggttttttctaggggtgtgtgtgtgtgtgtgtgtgtgtgtgtgtgtgtgtgtgtagtgccatgtaaaactctggggggtcaaactctttgggtttgaatttgaatcctggttgtaccacttagcagctgtgtgagctcagataatttcctaacagccctcagcctcagtttcctcatctgtaaaatggaatattgatagcaatcaatcacctggagaactgttgcgataatgactgtaaaagggctacttagcacagagcctgtaattataaacactcaatgcttgttagttatgacttcagtttattatagcaatatttcatgatcactaacatatcagtgttccagcctttctaggtgctcttctttctgaacaattttgagaacaattgttctaaaaatgtcctacatcacacacatgctgccatcaccaccctcgccctctcttattatcatcttcagaattattccatttttgacttaacctgtatcttatgtaactcacctcattctagctaaatcagtgtgtgatgactgccttctctcatgtacacgtgacacattatccagtcaccctgaggacaatgaggtgttcacatatggatttttggcattcttgttattgccatccgtggtacccctcaaggggcaacagattcactgttaccttttcagccctggggcttttcaaagaattcttcatcaatccataggcatgatttgaaattccacttctgtctcattgccctcagtatgaatttcttgtagaaattttgcaatttctcttagggaatttcctgtgacacctgtagcattctctaaccctttcattccccagttcctggcacccaggaagtgtcataaaaattgttgagtaggtaagagttacatcagtatagtaaaatgaccccagcaaacactcattttaagatggaagcattgagataggatgttttacagtccccattcatatcaccagctttaattattttttcttttctgaaaaatagactaggtttattgtcaaaagaaagaaagtgaatatcctgctttcagagttaaatttgtgacaattagttccctttaaccaacttctttccctaatcatttctctctcttgttcaaagcattgtttcttatgtgtgtttttaaaaatatgccacaagatttccacaatatatggttataaaacaggaacttgtcattgtattaaatttctaatttcttgcttcttgaaaagcccttctttacccacacctaaaatgacccctgaagtaagacccacaactctcatttttaaactatgttcagcatactttattctacatgagtttatctccttcagtgtgtggaaggacatctactgattccattgcattagaatttattttagatcacttcttgttgatggcaaatctttacctactgagggtgggtggaatttttggaaacaaacgcccgatgactaagattggagatcaaactgatcaagatcatattatttggggtcaaaattgaaggctgtattatgtagagtgatgagactgaatggccttcctgggtggctctgggggtgtctcttgaggcaacaccaagagaggcagtggggcagggggtgtcattcacaatgagaggacaccgtgctggctctggcatgtgtgggcatgtgtcagccacagtaaagaagatgacaggtagaagaatcagattcctgtttcttccactggccagagactgtgaatggagacagccttgaatcaccctagatcccagttcctcatttgtaaagtgagatcatcatactctcttccagtgttgttttccttctttcttttcttttctttcttttgtttggagatggagtctcgctctgtcacccaggctggagtgcagtggcatgatcttggctcactgcaacttccgcctctcaggttcaagtgattctcctgcctcagcctcctgagtagctgggactacaggtgcacgccaccacgcctgactagttttttgtattttagtagagacagggtttcactgtgttgcccaggcttgtctcaaactcctaagctcaggcaatccgcccacctcggcctcccaaagtgctaggattacaggcatgagccaccacacccggcctccagtgttgttttctaagacaaaatgtactaccgagtataaaaccacctcatttagggcatggtgcttagtgatgctcagtggctgacagttcctcttttcactctttcctttcctcatcttaaattaggagggcaattgtttgaacatgccatctcggaaattcttgcttaaaactcatgtttctttaaaaaaaaattgcacccacaaaatgatgtaagggtatcctgcatgctgggctaccttcaactggagtgtggtgtatggggaggagaacggacaggggagatgagtgacatggccaccaccacctaaagaagaattccaacagctccagagagagtagttctccagagcttctctgcttcccacccctatccctgcggagcccccagctctgtctgcccaggctgaaagagagaagggtgggattcatgagtaattaaagggaatttggaaggctgggatgttgcggaatgttagatcagtagctagaacagcatgtggtgttctttaggcaggcttcattgaatccatacaaaaaaagaaagaggggctgcctgcctgtctgctcatttatcaaacagcgaagctcaactttcacagctccacaaaagtgttttactgtttgctgagtcttgctccagaaattaaaagctgagcagcctgagcggggctgaaccgaccctgcattttgagactcgaactaaattgtgctgggctttcagattcagggaccagttgattatttggtgaaaggagaggagaataatttgtaatttgcagcccataagaaacacttaaaaaaaaaaaaaaaaagccaaacccccttcccacaggtttttgttgcagctgcaaggaggaggtgctatctgcagcagccctttctttgctcagagtgggaaaagtcttgacctgcatttgggcagaatgtgatgtgatacagcagcgcttccacccatcccccatcccctactcacagcaaactccctttcctctgatttctttacttgagattgcctttttctctcttcggaggaggaggagaagatttggccattagatacttttaggtaaaagaattttcacaaacagaactaaatattccaaccacactaatatgttccttgggaaagcataatataccacaaaagcccaaaaactagattgaatgaggagcgtctgcaaatccatgaaggatggaagtatagagggctaactccgtcagtgaagagaaagggctagaaaataatgataactagaggacgagtcactagagaggcagagaggagtgttaatagatatggaccccctgctccggctcctccctggcagctggtcactcctggctcccctccagccagcgggctgtgaaagcctgttgaggttgagctcttgccctgcactcttgtcccacttccggctggtgaagtcccaggaggcaagcctgggtacccagtctctagcctctctgatcctgctacgagcctgtgagataagctgagcgagtgttatgatccccactttatagatgaagaacttgatgctcaaatggaagaaagagcaaaaggtcttttgtgacttttcaatttagcacatttttataaagtgttaatgctgtcctatactttataaaagtgtgttttaagaacattgaaatgtgtctccccttggataaagcagctccacctttgagaaactatcacgaggaggaaatcccaaaacaaagtatccacaataaaaaacaaaaatcatgccacaaaaagatattgcttatagcattatttgcattaacacaatgctggagacaacttcaatggccaatcaaagaggaatgattctttcattctttcattcaatgagtcaatgaattaatgcactgagccaccttctctcccacctggactactgcagtagccttccaactggtttccctgcttccatccttgcccctaagtcagttctccacacagcagccagggtgacccttttgcatggtaagtcaggttttgttccccactcccctccttaaagccctctgaagtcttcccatctcactaagagtaaaagcagacagcttacaaaggcctgcaaggccctgtgaacccctccagcccccagacctctcctcctgccactccctcgcccactggctctgctccagccacatgggcctcctcattcttcctgaaacgaatgagacaagctcccacccaggtccttcccatgggctattccttcttgcagtttccttcccccagatatccacaaagttcattctctcacttcctttaggtcactactcggatgccacatcatcacagagtcctaatcaccctaaacaaaataacatccccacctccattttctttcttttttttttttccaagacagagtcttgctctgtcacccaggctggagtgcagcggtgtgatctcggctcactgcaacctctgcctcctgggttcaagcaattctcctgcctcagcctcctaagtagctgggattacaggcatgcaccaccacgccaaactaatttgcgtatttttagtagagacggggtttcaccatgttgtccaggctggtcttgaactcctgaccttagtgatctgcctgcctcaccctcccaaagtgttgggattataggcatgaaccaccgtgcctggcccccacctccattttctttattcccctcaccctacttttgtgttcccctctggagcacttacctgatagaagatacattgactttttcatttatttttggtcttctcacactagaatgtaagcttcttgaacagaggctgtttctgttttgctcagtgtgtttctcagtgcctagcaaaatgtccggcctgtagcatgagctcagtggatatctgctggtgaatgaatccctgctttgtaccattagccaacctattatggttattgaggctgcagcttgttgaacatggggaaaatgaggctggagatccagtttgtgtggagtcttacaggcctaggtcaggactttatagagctaagcagaacactgattatttataaagattctatgggagtggcggagttggagaaatttggtcaaagaatacaaactttcaattaggcaggaagaacaagttcaagagatctattgcacagcatggtaactatagttaataacaacgtattcttgaaaattactggccaggcaccgtagttctggcctgtaatcccagcactttgggaggcagaggtgggtggatcacttgaggccaggagcttgagaccagcctggccaacatggcaaaaccccatctctactaaaagtacaaaaattagctgggcatggtggtgtatgcctgtaatcgcagctactcaggaggctgaggcacaagaatcacttgaacccaggaggcagaggtttcagtgagctgagatggtgccactgcactccagcctgggtgacgagtgagactctgtctcaaaaagaagaaaaaagaaacaagaagaaaagaaaattgctaagagggtacattttaagtgttctcaccacaaaaaaataacaagtatgggaggtaatgaatatgttaattaactcaatttagccattccacaatgtatacatatttcagaacatcatattgtacaccataaatatacacaattttatttgtcaactttaattttaaaaaaagattctatggatcacataactacggtcacccaacaagtggcccagggaaagtttctaggaggaaataaggtacaagctgagatgtgaggatgagtagacattaggcagaaaaagggtgtgaagagagggctctggacaatgagaacatcctgtgggaagggccagagtaagacagaacacagtgtgttcatgaaacttggaagaagttccattccgtatggccggagcacaggaattgggagaggacggggagaggtaagctggaacaaaggcagggccaattaggcaggacctggtgggtctgggttctgtctagaggcttcatggaaaagtggtcgtgatggggcatgacgggaagcagggccaatgagactatggcagcactccaggtgcaaaaccatggtcctgggatgcgtagagatgggaggatatgggtagaatcaggaatatgaagatagagggtagaacttggtcacaggttggaagtggcacatacaaggcaatcatggtttgggaaaggcgagctctggtgtggtcaggtaatggggaaaggctcacagagcagcagagtgcatgctgcgtggctggatgggctctgagggcacaggtagtgaggagggagagagagtttaaggtagaaggtgcagaggtatggacctgggaagcattcagggaatagtgcaacaccaagtagtctgacttggacagaacctcgagttcatggaaggaaatttagagaaaagatggaagcaaagagtggtgtctgagtttcaatcaaaagaacctctgctaagtcaggtgaccgtggagaattgccagaggcctctaggtagacaggtaatgatctgcatcattccttcagtaaacctacttggggacctcaattatgcaaataatgatttttgattagcattttattaagcaggagcatttcactgccagatgatcacttgagtgggtgcagggaaatttcatccaggaggagacacggggctgtctgctgatgacaccatcccctcagctgcttctcaccttccctagcctattgggtgcagggccctcagatcctgttcatagcagaggccaccagaacatctccaagagggtcaatgtgaggagaatagaagagaaatcttcactgaagagttgatgagaacgagaaatcatttcattcctcaaacacacccaatgtgtaaatgtaggaatatgacataaaagaaataaaggttactgttaaaggaaggaatgagaggcttcgagacattctcattcgtctagaagcagtaacattgcggtggtagagtgttaagttggactggatgcattcaaatcgcaggtctgcatctgagctgtgtggctttgtgcaggttgcttagcctctctaaacctcactttactcatctatactgagggaatatcagtggaacctggcgctggattgttgtgatgattaactgagataatacatgtaaagtggttagcacagtgcctgagccaggactggaacccgggtgagcctgactccaaagcctgtgtgcctaatcactgtataccactgtttcccaattcactaggaaaacagagaaaggaggcagctaaggctgcatgggaagggtcacagggcaagtgggagaggcttggagaaagctaggagttccttggggtgagtggaaacagtgtggccttggcattccaggcacagggaacagcactgtggatgtgggagcaacataagcctggagctctggggagtggctggatttcaggctgggcagctgggtgggagtcgatcacagagggcctcatggaccatcctgaggagcctggatttttattcagagtgggcagcaagaagacatccagcattttcaatgaggaagtgaaatgatcatattggcattttagaaagatcctgccgctgaggccgggtgtggtgcatgtacctgcagtcctagcttctctggaggctgaggcaggaggatctcttgagcccaggaattcaaggctgcagtgagctaggatagcaccactactccagcctggtcaacagagtgagaccctgtctcaaaaaaatcaaaaaaacaaattccactggtgaggcaacaagactggtggcagggaaaccagttagaagaatgtttctgtggtccaggcagtgagagatcacagtggactagtgcagtagtgggggtaagggcagaaagagagaaggggctaggttcaggagacatcctgaaggcagaaccagtaggacctggggttgtgcagtgttaggaagagaggagtcagggaggactctcctgttctgtcttaggtaactcagtggagattgatgctggtcacacagatgttaaaactgcatgtattgatctatacattattcaaaaagaataagtaaaaaccatcaggaatgaagggagtcatagattaaattgatccgtgaattcccaggccccatgctatggcttgataattcctcaagatcacagtgcgtagaatcacaaacacactgattgtacacgttattgcctcacagaggtagaacaaatggctccagaaggccagtcatttcccaggggccttctggcacatctctagaacacagtcggcaacccctggtaccttcacctagggccaggcatcaagggcttggcctgtgttgctttatagatgttatgtaggataccatttggataaacacttagaaagatttcagaacttagcccagtctcttaaatcaagtaatcataagacttagcaaccaaacaaaacaatgctgctttcttcaattatctacgtattgtttatagaaaataggaaatgatttatgtttttaaaaaaggaaagaaagaaaaaaataacaacactataacactctggtagattttaggtgcttcttccaagattatcttgaactttcagttatttcaataaggaaatccttttctatttgcaaaaaacaaaaagtttatttagtacataaatatacaaaccctttttgttctacccacaatcccaatgccctaacgaatatccattttcattttaccacattacctgtttattcctatatttttacaaacaattctctgttataaaactataacataaacacagattgagatctgctatttcatttaacattataagcattttctgtgttgtgacatagtttttgttaccatcatttttaatggctatttcataatttctaccgtgtgtatatatactatcatgtttttagacagtttcctatcattagacatttatgctgtttcaaatttttcactctcattagtagacttacatttagcttttccttatttcagattatttccttggaattaatagatcaaaaatataagtactttatggcttcctatgtattttaaaaacgctctggggaagggttgtgctaataaatgatatcatcagccatctgagtattccagttttactacagccttgacagcactgaatattaacctttccaaaatgtctgtgaataacagagggttaaacatggtgccttactggccaagtgcagtggctcacacctgtaatcccagcactttgagaggttgaggtgggtggatcacttgaggtcaggagttcgagaccagcctggccaacatggcgaaaccctgtctctactaaaaatacaattagccagtcgtgttggtgtgcacctgtagtcccagctacttggtaggctgaggcaggagaatcacttgaacccaggaggtggaggttgcagtgagctgagccatgccactgcactccagcctgggcaacagagtgggggctctgtctcagaaaaaaacaaaaaaaaaaaccaaaaaccacaatactttactgttgtgtccatttgtatcggagaaattttccagacctaaacataggaaaatttctgctttttctaagcaactagtatgcacttatattgatactgggactcttggaactctattgtattatcttctttgcttgggtggttaggaaacttagaacccacttttaaccaatgtgaaaaatcccctggctcaatttttatgcttcccttgttttctttctatcgctattagcatgtctatgtctgttcagtagtgtgcctttgtgaacagctgcttcaaatcctggctctgaagccattcatatgctgaaagtctgaagggcttggccacaggttaatataaatccaaggtgatgaggccactaaacctggatgcagtcttaggctgcactgctagacaaagtgtttaaagagcactgttactgaccccatcttgaatcactgccttttactcaggtcaccacaatttgagaaggacataaagtgaaaagcttggatcttcagtttacaagagtcagggttaaagagatgggatttattgcctacaaagtggtacccttaaagaattcagagaattgttgcatcattttgttcagtattatcaccatgagatggtattttaaaagccttttttacttccaaaagtggtttcatgatgctatcgtattagattctctaaacattcttgtgaggtgcatctttttgtcaacgattctctgatgctgaaatgctgcggcatccattctccacactggaggtggtcagctccccagtgtagagaaatggtcagtcttcaaggttctcaatttctcactaatttgtgcacttctgtccatcccattgataccattttagttgagatcaccaacacctagccctccaattaggggaagactacacaaccccttagtcctcaaatgccacaggaggaaattcaggcacagagaggttaaacagtatgtcccagttcaaacagctaacaaggtcacagtccatatttgttgagtgaatgagtaaatcaatcagtgagagtagtggtgtggataaaagaggggtgaatagatgaatagagattcatccccatccctagagaaagcactcaaggtttatgccctaccaacaagaaatcagcaacagcttcttttctcatgaaggcttactctctctgaccatgtatgcctgctcagtgctgtaccaggagggaagggagtcttggttacactcaaaaaatccctggaagtaaaagggtcatcaggacaatcagtggtaataatgggtaacatttattaagtacttactaactgccaggcactactgccagctatttacatacattcactttttaaaatttcacaataactctagaggttattatcattcctattttacaaatggggaaactgagtcatgtggatactaaataacttgcccaagggcatccagcctaaccaatgcctgagcttgcattcaattcaggtagtcgagttccagagttcttgcacgtaacccctgacctgtcatgcctctccacaaacatcatctccgtaaaccccaaggaaaggggcctcatggttatgttttcaccttgagagatgctctctcttcacggatttcttgtgaactggtgtggttgtcctgggcaacagcaattatcatcctctgctctgcagacagaaaaaagatacccctaggctttcattccttcattcaacagatgtggattggggtctttgcatgtgccaaaccctgtatgaggtccttgctctcatggagcgtgtgttcaagcaggaggagacataaactaagtacccagagagtaagtgaacaagataacttcagatagtgctaagtgataagaagacaaagcagggccatgtgacccttgtgctactccacactggctggtctgagaaggcctctgggcagaaggacattgtccagacgcctgaatggttaaagaggaggcagtcttgtgaagagctgagtgaaattccactcctgggtgcagtacaaaggccccccatggggagcaacgctggtgtgtttcagtaatagagaaaacaataaaaagccagtgtggctgggatctggtgagtaaaggtgagaattataagagaggaaggccagaaggtaagcaggacgagttacagaggctaagtgtgggttttagttccaggtgctgtggaagccactggagggttttaaacaggggagaggcaggttctggaccaaccagaactctccttcctttgtgagtaggacggggtgaagcatagagtggccaagtgagacccccttagtatccagagccccacaaccatccaagcactccccactctgacaccagtagtcttctccagggtcctcacagactcctattaagtcattgcaaccaaggacctatgttttcctcccttctgtagatggctatttgtaaaactcagtcactatgctcccaactcttcccaatgggtaactgattcttgtgttgacttacagatcataaggcagcagtttcctcagttaaccaccagaagactcgggacccgaggacagtcaaagtaagcaccggacggccattccacctgcagagcgcacatctatgggcctcgagacaggccacacccttggctctttatcctgagctctgtctgcaggcctggcagaagtctgtgcctagagggaatatggaagagctttatgacggccagggcccctctctcaggactcctgaaagagaggttgtccaaaagcccaagacgagttggctctgctgctttaaggaatctgattttgtaccaccctgcttttaggcatattttgtaaaatagtcttgggcatcattgaaaggattgccttgtggcctcttggaggatcaccaggttatctggactgttttgctgagcaaactctgctctgatagtatgcagtagaccagagaagcaaaactgtactattccctgcatgggagatggggcagaaaggtccagctgcaccatggtccatgagggttcacggcttcccattcatcagtttcatcaagcaaccaaccaactcatgctttatactttctgtgtgtcacatatgtggtgctaggtactgggaacacaggagcaaatcagttgctgccctcatggagcatagattccggtgggaaacagacaaaacagagaatcagattgtgacaaagttgtagcagagagcaacaaaagaggaatggccagggaaggtctttcagaggaggttacatttaagtaaagactaggggagtgcagaaggctgtgcagacacttgtctgctaggtgtgagtcagtgggaagggaatctcttcctgtactgctcgaccttcattaaaatctgcatttataggacttgcctctaaggatgtttcaaaaattgttggacgataataggtgttccatgaagaagagcagcaggccctataagtttggttaacactaagtttaaacagtttcctttactgcaagacttctcagaacccttattatgctaatgtacaaggtgactccactagagggtgccttattatgcagcatttctaagcattttgaccacgttgagcaggtcagcacatagtgacctataaaacactgtaactttttagaaaggcaaccatataggacttttaagacttgtcttgaaggatgtgtcaaaagcatgtccagtgctctcaccctgggccaaacccctgtccctcaccagctcctctcatccctgggcagcacattcccatcctccaagggtgggtttgattttggagccaaggtagggaaagaaaatggatgatcgaactgggaaaaacccttttttggtattctgaaaataatgagactaatttttttggtgtagctcagaagcttttgaaccagtctctaaaggaatttccagaagactgttgaacaaaggacctcttggaataaattcctaataattttccaagatgactattctgaaaaaaaaaaaaaaaaaaaaaaaaaaaaaacaaacctcagttataattttaaaattctggtatttgtttaaaagtaaggtttcagccttggtacgattatagattacaaaagccaggttcttccttgtttgctggtaaacacatagtaggcaattcaaaatgttggtcaaacagaagagtggatggatagaacgatatggaataaatgaaaataaattatttttctccagctcttggtctttgaggaatcagtggctccgatagcttgttgctcatttctaagaagagcagaaatagtaaagacacacagtaaagagagagcagaaaggtttcccatcctgcataaacagagaaaatttccttctgtccacatgggagagtctgtttttgttttgtttgtttttctttttctttaacctcgaggttggcaaaataccctctttaaaaattctgtataatcaattttattgtatcctcttccataaggatactccaaagttggtcacaccttcgaccagttgaaaggcagtaagaagctcttgtctccaacctgcatcatggccttatagagaaactcccttggcaaattgacaatgacagaagaaatctgggggggtgggccaggtgcagtggctcacgcctgtaatcccagcactttgggaggctgaggcccgtagatcacttgaggtcaggagttcaagatcagcctggccaacatggtgaaaccccatctctacaaaaaatacaaaaattagccgggcatggtggcacgtccctttagtcccagctactcaggaggctgaggcaggagaattgcttgaagctgaaaggcagaggtttcagtgagccacgattgcaccactgcactccagccagggtgacagagcgagacctgtctcaaaaaaaagcacattctgcacatgtatcccctgcctttttttagaagaaattaaaaaataaataaataaatctgggggtggctggtgaggaatgtgttgttgtgccctacagaactgaaatagaagaactcaagatcagagcagtagcttcactgtggttgttgattttagctacgtgatctctgaatagtcaagaagtggtctggtctgaacatattagatgatctggctcttaagaagttataaaggtgaactttttaaggttacggtggtgtgtcataactgtcatcccacctgaagccaccggaaccatgctcctcccccacccacagagtgagttccaggtgggaaggcagttatgacagttgagaagtagtagaagacacggaaggcacagaaggcagacttcgctcagcacaaagaattttctgataaccatactggcaaaatgaactgggctgccttcggagggtctgaattcttcatcccagaaggcattcagatagattcgagatgcccactaagcagaaatatcacggaatggtatcaggagtaaaggagggttggggagagggaaggttttgacgtgctcatctcttccctcctcgcaaaagcccttcccataattcaaaatgccttctcatctgtatgattttgtgactttcattgtatctccatgggtagagaaaagtagttaatatgttgtgcggtgtttctgaaagcgaggtccacggatgacctaacatttgtattgccacgggactgtgaaaatcgactctagacgtactaaataggagtctttaaggggggagcagggcccaggagtctctattttaatggttttttttcttcttcttcttttagtcctagctactagactaccagggatattttaatatgttttgtaagtgattcttagtagtagtaaggtttgagaatcactggcttagtggttcaaagcacttgggaggttcaaatcctgcctctgctccttactcactggctgatcttgggtgcatgacttaaattctctgggccttagtttccttatctataaaaatggggataataattaattctagctttatggggattttgtgagattaaataagataatgtgtgtcaagcactcagtaccagagatctcaaactgatgtgctttagaattacccctatggtgcttgattcagtgctgattcctgggccccattcccagatgttctaaatcagtaggtactgagagagggcccaggagtctgtatttttattaaactttaaaaatgattctgataagatcaaagtttataagactatcttgcagtgttttcagtaggatagcactgtggcttcatagtcaaaaagacctgtctgtgttcaagaacctgttcctcccctaaacagctatatgaccttaaacaaattatttgagctttcttgcctccagtttctcatgtgtagaaagactgtaataatttccattattggttattttacaaattaatgcatgcaaagtcctttgcaaactgcctggcatgtagccaatatataatgctcaatagattatagctaaaatctaaacaaaatgcagcctccaatcccttgttagtcttaattgaaaacattgctaatattaagcctattttgagttaataaaaagttctggtcttcgctttacattcagtgtcaactgaagcactgaatttacctttttaaaaatacagttctttgagactaccatttattgattaagaaaaacataggccaaggccaggcgcggtggctcatgcctgtaatcccagcactttgggaggccaaggtgggcagatcatgaggtcaggagtttgagaccaacctgaccaacatgatggaacaccatctctactaaaaatacaaatgttagctgggtgtggtggcacatgcctgtaatcccagctacttaggaggctgaggcaggagaatcgcttgaacccgggaggcgtggaggttcagtaagctgagattgcaccactgcactccagcctaggtgacagagcgagactctgtctcaaaaaaaaaaaaaaagaaaaagaaagaaaaaagaaaaggaaaacacaggccaaatgaatttttattagaggtgcagttagtagtcacaaacatatcctgcttgggtccccacagagaagggaccctcaagtgctggtatcccatttggctagacatgagagatcaagtactaatggaaaatttttcatcccctctctgctttgcaaagtatttgacttaacgttttctgtaggaggcaattttggttatttttacctgcctgattgatggctggcactttggtttaattctatatttcagtgatattagccttacaggagagttaactcttctatccccaggtaggatggccccagctttccttggccttgggcaacactccctactcaggaaacctcacttaataacagtgcatgtgggtctctctctttttttttttttctctctctccctccctccccttgtggcccaggtaccattactatggcattgcagtgaaagaaagctcccaatattatgatgtgatgtattccaagaaaggagctgcctgggtgagtgagacgggcaagaaagaagtgagcaaacagacagtggcatattcaccccggtccaaactcggaacactgctgccagaatttcccaatgtcaaagatctaaatctgccagccagcctgcctgaggagaaggtaactacaactgaagtgactatttggggtgggtggtttctctctctttctctctctctctctgtctctatctctctctctctctcacacacacacacacacacacacacacacacacacacacacacatttattgcaaaaccgtgagtttaaaaatataaagatagaaatccaggccaggagaggtggctcatgcctgtaatttcagcacttgggaggctgaggtgggtgaatcacttgaggtcaggagttcaagaccagcctgaccaacatggtgaaaccctgtctctactaaaaatacaaaaaattagccaggtgtggaggtgggcacctgtaattccagctggaggctgaggcgggagaattgcttgaacctgggaggcagaggttgcagtgagccaagattgcaccattgcactgcagcctgggcaacaagagcgaaactccatctcaaaaaaaaaaaaaaaagaaaagaaatcaaaataaagcatggactatagttaataacaatttatcactatgagtttattagttgtgacaaatatatcctagtaatgcaagatgttaacaattggggtgaggcatatgggaactcccagtactatctttacaacttttctgtaaatccaaaactattctaaaataaaatttgctctgtcaatctctatcatgtatgcctatctgtctatctacctatcatctatcttctgtctttctacctacctacctgtcctatgatcttatgctgtctcatttcatgaggaaagaacctctcccctctgaattgcttttccacaggataaagtccattttcccatgtgctgcaggggatttggtgaaataatagtctaacagtcaaagaagattttataggtatagtgaatctgatagttttgatcatagaatatttggagcaagttactggaaaaataaatttggggaagtttcccttggggtatcacatttctttttttttttttttttttttttgagatggagtcttgctctgtcatccagcctagagtgcagtggcgcaatctcagctcactgcaacctccgcctcccaggttcaagcaattctcctgcctcagcctcccaagtagctgtgattacaggcgcccgccatcacacccagctaatttttgtatttttagtagagacggggtttcaccatgttggccaggctggtctcgaacttctgacctcatgatctgcccacctcggcctcccaaagtgctgggattacaggtgtgagccaccgggcccagtcgagtatcacatctttaatgcacctattgatgcaacccagtgctgctctaacatgtattgagcttctactaagtctccatgtcacactaggatctgggatgcagtgaagaatgagatgagtcctgctttcagaaagcttagagtcaaccagggagatagtgcttgtataagtcaaactaagtttatataaaatgcatgtctatgttctaaaatgaggaaaatgaacttgtatctgtaaaggatacattaaatctaagaaatagataaatattttttcttaaatttgcttttttggtcaataaacatacaaatgaacttcctgcaccatggatttaaaattctcaggtaattgaaaaaaacataaaaataaaaaaattattggataaatggagggggagattaatttttttttttatttttgctaagcacattgcagagaatttccaaatgtcttatggtgacttaggcagaatcacttcttcatataactatacattggattttaactttctagtggtctcagccaatgaagagaatttagttccataaccctgcttagctctatgtgccaggcactgtgctaagtgctggatacatgagcatgaataagataccatttttgttttcctagagctcacagtctcagggggtggaaaatgggggcaggaggagaaaccagcgcattccgtatctcagggagaaacacactcgtgctgtgtgagcacagaggagggagccaagggtcagagaataccacctaatgaaaatcagtctcacctgggtctggtaggctgagccggtgttaggtgaattgcatcccccccacagggaagaaatgacttaaaaactgaaagtccaagggcagcagcaatgtgtattaatgtatgtctttgttgttgatcctctacacacccccacaggtttctacctttattatgatgtacagaacacactgtcagagaatactggacactgtaataagagccaactttgatgaggtaggtcaacaagggttgagctgtgaatactcggtattaaaaatcttgtaacactagctcctatttcatgagctcctgctaggtgccaggcctggcatctggaagcccttcctggatacccattagctcacttcatcctcatgagatcccatgaagcaggtacgattattatccccattttatagaccatacatgtgtatagcagtgggcttggcctcctcctttgactgaactggtgaactgcctcctgccctatcagcacactaggaagaccattttgccaggatatcattaaacccaggattatagattcagagaagctaaagaaaagcttccttacattttggaaaaaatatataaaaagctttattctattttgtatatttaggcttttcctgaggcttgtccacttgggtacatttggagctggttaccctccattcccaaggtctgatccatagatttccatcaaatcccattagtagggccatcgttaaatacaaacaatgtaagaagtccattttattttaaaatattgtagttaaagaatggagaggaggaaatgagaaaggatgggagaacaataaccaataataaagttatataactttattattttttgagggaagacaatgtggtctctaaaaggactataaaaaacccagtagctattgatggaagacatcccagaaattcctttggtgtgtgtgttgtgggaagggggtgctgttgtaggtggagggatataaaaacgatgtcaggtacaaaatgctcttctcctgtacttttctgccttcccacggctgtgtcctttaggagtaaatgtttgttgagcacttccactatcactttgctcacagacacagctccagacaagatgggagtgtgttggtaaagaagtactgttcttccttctcttgacttttatccactagacttctaaaatgtactttaaaatgtcccaaattacttgagcaataatttcagtgatttttttcttttaagaaagaaaactccctgctttctttcgaactgcggtttggctctatcttacattccaaagatcactgagatcaggacaaataatgattcgtgactggctaagacaatactagctgctgtaacaaataactctgcaaatcttagcacactggaggtttatttcccacccatgtcacaatccagtgcgtttgttcttggttggaaggctggttgctggggggtgattcagggactcaggctccttccaccctgccctagaaccttggagtcctctttgttcagctgatgggtggggaaaagaactactaggaaggcataccccctacttatccttgtcagcccagaaataaaatagcacttctgcccatattccatggacgggagctggtcccacggccccaccttaatgcagcgggggctggggagtgtggtccctcactgggcagcagcttacactactcaaatctctaagggacagctgttcctctctgccacagttaccaacaacaaaactagtggcagtccccccttatgttcatatgtagcttagtcatctcaaaactcactctcatttcatttcatttgcttaattccaacacctattgggtcccatacactattggagagataagtaaaacacagttgataggatggggggaaggcatgtaaccagcaactaggatgcagaatatatggtgagaggtccagaaacattgaggggcagatgctgctatggaaagagtgccaggcttcaagtcccaggcttggattcaagagctggctctgcctttcaagcctcaattcctcatcctagaaatgaagatttaaaaaaatcatccccatctatttaattcatagtgttactagaaggaggagataagactgcctggtaaaagctctttgtaaactgtaaaaggtcatacaaatgcttgttcttttcagatgtatcaaccagagtgttcagagatttggccaaggtcacacagttggttagggccaaaggtgtgacaaggtccttcgtcacctcacacccttaggccaattccaccccactggcaggaatatttggtggctgcttttaagatagctaattcttctcagccacagaataatgaagggagacattttacctctgatgaggatggctttctcctatagctgagaaaagtcattggtaaatggatggtggatgtatctggtacaccttgactttacagttggtttcaagtcttccaagtctttaatatcagttgaggttacaacttatgctagtatcacagtcctaaattatcttgtttgttcacttgttcattgtttgtctctaccactataatgtaagcttttgagggcaggaagctcatctgtcttgttcactactatatcctatctagccatacttttaggctgtcagtcagtatttgttgggtgaatgagtggatgaatggatgaacaggtgtagaaatgccattgacttataacattgtcaagcaattaaagaatgcaaatctgaggccgggcgcagtggctcacgcctgtaatcccagcactttgggaggccgaggtgggcagatcatgaggtcaagagatcaagatcatcctggtcagcatgatgaaacctcatctctactaaaaatacaaaaattagctggacgtggtggcgcgtgcctgtagtcccagctactcaggaggccgaggcaggagaatcgcttgaacccaggaggcggaggttgcagtgagccaagattgcgtcactgcactccagcctggtgacagagtgagactccatctcaaaaaaaaaaaaaaaaatgcaaatctgcatgtaggggactcgggaacgtcttctccagactacattgcacaataagctgtaaagttcagtagtcttgtgattgagtctcaaatctgccactgactagcctgtgaccttgagcaaggcacttaacctctctgagcctggatttgttttgctacaagatgaaaataataattatacctatctcatagtgaacatgaaattgtgtatgtaaagtgtctgattttgttctagaatatgatgttaggcatttttgtaattattttattgagagccttccaagcctggtacacttagggaccccaattgcaagtcatcacaggtgtttccacaaggtgccaatgttcagaatgaactaaatatgaacatggaaaaagaaatagaaaatttgcttggtattcctaaggaaatcatctcctagtacttcactgagctgagagacaaagggccgagagttcagaagattgaaacagatacctcaggaaacttaattttactaataatttggaatcatttgcctctgattctttcactgtttatgcttgtaaggtgtaagaacttatcagaactctcctttctgcctaataatgtttccatttgttaaatgcctacacgatgccaagcattttacataagctatcttatttcaccctaatagtaggaagacatcattatcttcattttacaaatgctggtaactctgagagttatatgtttagtcctgagctccagattcaattgacttgaaatttaacttaacacggccaaaccagagctcttaattttctgccccaaatctgtttttcccaggtcttagattgccactcccctccacccaattgcttaagccacaaactttgattctctcctttccctcacccttcagatccagtccactgggagatcctgtcagctccaccttctgcagggaaacactgcatctgtccatttcatgcctaacttccaagccttagtgcttgagctaaggccattctccctccttccttttccttctcacctggaggaacaagtatcattggacaataaatgacctaaaatgcagagtagaaagggatgttaaaactggagaatacatcttctacaaaagccactcagcaaactgaggatggatcagccttcccagtgcagcttgaacaggcttcaaacagacagatgcctgctgaggagactgattttgcacagatttgtttaaatccacacaacagctgatcttttctagacattctgctagaaattgactgctcatataaaaaagggggtacggctgcctgcaagaagagctaagtaaggcaaatgaattcaaaatgtgtcaactcaagaatcagctgggcagagcttcttactcagagttagaggagcagacaagaaggcccaggacctgacctgagcctgatgcccagggaatgagctgggatcaggggacagtggagggtcctctggagggcaagtaccttgtccaaaagccgtggacatctccaggctcaggccacgctaatagtcagccaccgggtgtctcagtgacagaacaaaagtcttgataggtgagcggagccacagtagggatcctggctgggtgacattcagaaacataggcaagaaagtctcaaacacctagggcaggacactgatctcttgagcccagtagtggtagtgcctccatgatataatagtagtaataacagctaacctttattaaacatctatgatgtgccaagcactagaagcactttttagaaatcttcaccaaaacctatgcagtaaatactgcttttatccccatttcacagaaggggaacggaggcttagagatatgatactcctcagtagtggagccaggattagaaccctgcaagtcagtcttcactcctccagattttgttttcattttcaatctggatgaaaactttgcagtatttccactgtcagggaataaacaggactctaactgaagtcttttcgatttacagacctgacttcattcaccactacgatcatgttttcggcaatcaccacttctctcctaggaagtcagaggggcatgcctttatccctgttccttatcctccaagccttccatcctgtacttccacagggaagtccaggcaggctgtaggcatcagggaagcctattcacaggaggctgagatggagtcaccaggctagagtcggggcatggctctactagccagaggcagccttttcagagcaaaattaggccctactccttggaggggcctgaaggatgctgcaggttaccagggcaggggcagaaagctgggaagtaggcagcagtctagggagagacatgggcctcagcaatggggtagaaacccagttaccatgtgaagaacaaatgccacaagagagactgtggaaggactaaggcagacataggctctatctcagccataccctgactggctgtctggctttggacaactaatatctctgcaaataagagtaatgattctcagctatagtattatgagtattacatgaaagaacctaagcaaagtacctggcatatagtaggtactcgataaagaaagctaatggcggccaggcggtggctcactgtaatcccaggactttgggaggccgaggcgtgcagatcacctgaggtcaggtactcgagaccagcctggtcaacatggcgaaaccccgtctctacttaaaaaatacaaatattcgccaggtgtggtggcacacacctagaatcccagctactcaggaagctgagacaggagaatcgcttgaacccaggaggcggaggttgcagtgagccgagaccacaccactgcactccagcctgggtgacagagcaagactccatctccccagaaaagaaagctaatggcaataatacttgccccaaaatgttagactagagggactcaattatctcccacaccaaatcaggattgatttggggaaacagggatgtggataatgctacatgtggaactcaagagtgcccatctgttggggagagaaggaaacatgatccagaaaccaagtcaaacccattggaatgtataaaaattcagttatgtgttccccagcttcgagatgggctgctccccaactgaagatgtgctgcagatgttagctgatagctgaagtctagattttctcaaatgttattatatacatcagttactatcttctactatttctcttcacttcccttacctttcccaccacttcaccccctattctactcaacttctaatccacagctaaaagacagaggtgtaggggaggcggcaaggggttctctgctttggacattcactctgcccttcgttcagtaacaatgtggctcaagttcctgctatcatcatattaatagtaataattgcatttctgggtgcctgctataatctggttctttgctagtggtttggggagttttaaaaagtcagtcacacacacttcatgtgcccacatagcttaccactcaggtatcaccatctagcatcccatatagcacccactggccagggagctttgggaaatggaagaattctgatatgaaaagacttttgcacttgacccaatctttgacgcacaaatttgaatcagaattttgtgtgtgtggcacctactctcctttcagccacactccttttacccgcgactcccatacctttcccttccttcccagaatacccaggggcccctgaggttcagtgggctcaaagaatagtgagtactagtgctccgacctttttaaaaacaatgccccaccttcctttccttaaactcttcccagacctcagtaagcactgaaggcgctgaggggtgaaagtgcttcatcttttggggcagaggagaccccagcctgccaggctagtcagttccccagcagtgtgcatgttgcatgcctaggcagagggaagacttgaagcaggagaaactcccagggcctcctacaacatggcaggctgggggtgacttctgctgccgcaggggaagtagatgacagcattgtagactgggttggccttggtggagtcccaagcttctgttgggagggccctgggtaacctcatgattcttctctctgtgggtcaatacaggttcaaagtttccttctgcacttttggcaaggaatgccgccccacatgctgcctgtgctgggctcctccacggtggtgaacattgtcggcgtgtgtgactccatcctctacaaagctatctccggggtgctgatgcccactgtgctgcaggcattacctgacaggtgggcatgcttattcttgtcttccttcacggctggtccacagaagggattgttctgcttctcttgtactgattataatcatgcactgtccagaggcctcccttgtaaagaccattaatattgaacttttaaatattaaagtttatttatattttggaatataaataaactgttaatattttgaaccatttgtgtggcttaaaattcaaaggtataagatggtgtacagtaaacaatctccccaccagactcctgttccccagacaacccagtcccttcccagaacatcaaatagaatcattttcttggagtctgtccagatctgatatgcacatgtaatcaatgcatataatatactgtttttcttactgaaatggtgacatacactataccctgttctgtgccttgctgtaaaacaaaacaacttaaccttgaagtttatgctggacagcttccatgcccctccagatgtactctccaccacacttcatgctgccttctgctggggccagaggtggggcatatgctgatagcatgggccaccacacagggcgcttctcagggagggatggagggaggagagtgaagtcaggagatggattatctggcccccttcctgtgagattgtgttgagctggctgggttccttcactgggctgtgttcccttccaagcaactttccaggctgtccttgggcacagagtgggcgagaacctgtgctccgagccttaggttgcagcagtctccctcatagttcctctactccgtccacacctttgtgacatgtcccttgtaaataaacccacccatttagagtggcactccttcctgttgggactgttacaaagcacattgcacatccatgtataaggtataaggagcttttttcttttttacaactgtatagggttccaccatcttgcatttagtcaattctcttgatatgtccagttttgtcctactccaaacaacactgtgatgaatgacatttcatttaccttttttttttttttaacatggtgaagtgcattagtttcctgtaactactgtaacaaattaccacaaactggcggggtgacttaaaacaacagaaaagttattctcccacacttctggaggccagaagtcccaaatcaagcattggcagggttggttccttactgaggctctaagggagagtatgtgccatgcctgtcttctggctcccggtgttgccagcaatccttggtgtttcttggcttgcagacgcatcactctaatctctgcctccaccttcacagtgcttcctgctctgtgtgtgtgtgattttcaatctgtataccttttccccacccctgtcttattgcactggctaaaatctttaggatgatgtcctagcctaggcaagggtggacatctttgcatttaccctgaccttaaggggaaagcattcagtatttactataaaatacaatgctagctataggtttttaatatctggttgaatgtgtgtgtgttcgtgtgtgtttataattattataattattattattattttttttttgagacggagttttgctcttgttgcccaggctggagtgcaatggcgcagtcttggctcactacaacctctgcctcccgggttcaagtgattctcctgcctcagcctcccaagtagctgagattacaggtgtgcaccaccatgcctggctaattttttgtatttttagtagagacggggtttcaccatgttggccaggctggtcttgaactcctgacctcaggcgatccaaccgcctcagcctccctttgtgctgggattacagacgtgagccccctacacctggccaattaatttttttttaagatgaggtcttgttctgttgcctgggctggagtgcagtggtgcaatcattgatcactgctcactgcagcctcaaactcctgggttcaagtgatcctcctgccccagcctgcggagtagctagaactataggcatgccccacaggacctggctaatttaaaaaaaaaatttgtagagatagggtctcactatacagcctagtctggtggtcataaatttttaaaaaatatgttgctagatctgaattgttaatattttgttcagagggttttatagttcatcaaagttatttgatcaataacgaaagttactcatctttagttttcttgtctcataatgtctttctcttatttagatatcagaggaaacctggcctcataaatgcattgaaaagtgttccctctcttctttttttttttaattcataatattttcttattatccttttaatatctgtaggctctgtagtgatgtgtcctttctcattcccgatgtaggtaatttgtgttttctttcctttttcttggtcagtgtgactagaaatttttcagtgttattgatctcaaaaaatagcttttggtttctctggtttcttgctttctgttttcaattttattgacttttgctttttatctttattcctccctttttgtgcttgctttgggtttattttgctcttctttttttagtttctttaagtgaaagcttaggtcattgattataaatctttctactttcctaataaaagcatttaatgctataaattttattctaatctctacttagctgcacccacagattttgatatgttggattttcattttaattccattcaaaatattttctactttctcttgtgaattcctctttgatctatggggtatttagaagtaaactgtttaatttctaaatatttggggattttcaagatatctttctattaataatttctagtttaattcccttctggtcatattatatacatagtaatatatcaattcttttaagttgatacttgtttcatgctccagaatgtggcctattggtgaatgttctatgtgtacctgaaaaagctatatattctggtatcattaggttaattattctataaatgtcaactaggtcaagttaattgatagtattgtttaaattttctttgtctttactgattttctgtccatttgttctattgattagcaatagagaagtatagacacctccagctctaattgtgaatttgtctatttctatacatttttgcttcatgtattttgaagctctgatgttaaatgcatacaaattagaactgttatgtcttattggtgaattgacttcttttcataatgtctttttttatctttcataatatttcttgttcagaagtttactttgtctgtttgtaatatagctactccaggttttttttaaattagtgtttgcattacatttttttccaccctgttaatttgtctttatatttgaagtagatttcttgtaaccaacatagaaacatagagggaggtctttcttttttattgtctggcaattttcctttttagttggtatggtatgtgtagatctttatatttcatgtaattaaatatatggttcaattaagatcttccctcttcctagttgttttctattagtttcatcagtttttgctcctttattcctcttgttgtgcctaattttgtttaattatttttatcatcccatttatctccatggttggctttctttttccccctctgagacagggtcttactctgtcacccaggctccagctggagtacagtggcacaaacacagctcactgcagactcaacatcctgggctcaagcagtcctcccacctcggtctcctgagtagctgaaattacaggcatgtgccactaagcctggctaatttttttacttttatgtagagatggggtcttgccatgtttcctaggctggcttgaactcctgggctcaaggaatcctcctgcctcagtctcccaacgcgttgggattacaggtgtgagccaccatgcctggccatgattgtctttttaaaaatacctcttaaaaaaaatttactagttgttttaagtttgtatatcttctttttctttttttttttttttttttttgagacggagtctcgctctgtcgcccaggctggagtgcagtggcgcgatctcggctcactgcaagctccgcctcccgggttcacgccattctcctgcctcagcctcccgagtagctgggactacaggcgccagctaccacgcccggctaattttttgtatttttagtagagacggggtttcaccttgttagccaggatggtctcgatctcctgacctcgtgatccgcccgcctcggcctcccaaagtgctgggattacaggcgtgagccaccgcgcccggccaagtttgtatatcttcaattataatataccttcaaataatgttatactgcttcacatgtagtgtaagaatcttaacaacagtatactccctatttgtcctcccatttttatgctattgttgtcatacattttgtttttgtatatgctataaactcctaaaacattataactatttttgctttagataactatctttgagaatgattaaagatatgaaaaaatattttatatctgctttcattcacatgattcctaatcttcatttctttgtgtatatccaactcatcggtgtaatatatgagttggatatgtaatcatagtcctctgcctgcaaaattttctttaatgtttctcatattgcaggtctagtggtaacaaattatttgtttctgaagaggtctttatttctctttgattttgagaaatactttcactgggtatggtattctgaattaacacgtttttcacttttggcattttaaacatttcactccattgtttttggcttgcatgtttgtcttttgtacatctttgctcctctgtaggcagtgtgccttttttccttggatgcctccacagttttctctgtctttggtttttcagtctctatctttggttttcagctgttcgaccatgatgtgtctcaatgctttgtgttgttttcaatcctacttggggttttctgagcttctcggatctgtgctttgatgtatttcattatttttggaaaatacccattcattatcttcttctctgctttctctcttttttctcctcctgatatttcaattacaagtatgttaggccatttgatactgtcccacaactcccggatgcttgattttgctttttctctactcatttttctccttgtgttttagatggagtaatttttactgacctatcttcaggttcactgagtctttcctttgctatgccaatgctactaatgagactattgaaagcattttttatctccatcactgtactttgtttttatgtcaatttctaatattacattcttttaaaagtaatttctgcattctggctgggtgccgtatggctcacacctgtaatcccagtgctttgggagatgaaggcagaaggatcacttgaggacagcccagacaacatagcaagatcctgtctctacaaaaaaaaattagctgggtatagtggcttgtgcctatagtctagccactcaagatgctgaggcgggaaaattaattgagcccagaaatttgaggttacaatgaatcatgatccaggccggatgacagagcaagaccctgtctctaataataattattatcacatttattattaatatattaattttatagtagtaattatttatgtgttcttctgaaattccacctctgttcatgcttgtttactttttccattagagcttttaacatagtaatcatagttactttaaattttaaatttcctgtctgatagtctggttatgttgattgttttgtttcttgacagtaggttctttttcttaattttctgtttatctcataatttttattggctgccaaacagtgtgtagaagagtagagactggggtaaataatacttatgcctggaaatgggcatgcttcttcccctgggctctgaatatgagttgaggcagtctattcgggagttcattgcatttgggttttgttgttcctatgattacctttagtgtagcaccagatttaaattcttctggggtactttgtgcttaagttggagatttgttgggttgtttcccttaatgtgcctactcctttacctgtaggccatccctatgcacacagttgcttaagacttggtgcttgttagcctgattggagctggaagtggggatgtgggttctcctttgtacagtcctgtttcagtcttaagcaagccctgtgctttggatctcagagttgggcactctcagtgatcttgactcattgcagagacaaaactctagtgatttgatcccttggtggtttctagcagggttacagagctttctcttttcatctttcccccacctacaacgggtcttccctattccctggggtcaacagtgttttctgcttttcccctagtcaactgaggcttttgttccataagggagaaaggtcttggtggaacttcatgctttttccacagcaacagctgttcccttcctccaaacatgtacctctcagaaaggcttcttctgtcctcctgtcctgtccccagtcttcctcatgaacacctggtgaggcctgtggaggagggcttgcaaatagatgtgaacttcttttgcatctgtcattccaagagttctatactctcatggtagttcatattggcccattagcaatttgttaaaagtgttagcaaaatttatttcacccacttgtatgtaacgccctgttttcttccctctattgcaagtgagccagtccccaagtccttctctcattggaggtgcctttctttccataaattccaggctacatgattgtgacctcagctctctaatggtttaaagaaaagttataattttgtagattatctggctttttcttgttatggtggaagtgatgctctttccggctttccacattgtagatggaacggaaacacacccaaataggttaacaaaggttacctccagaggggattatggccacattttagtctcatccttttctgcattattcaaatgttctacattaagaccgaatttcaatttttataataatatgtatatgtctatattatatacgtaggagccatttagggctttgtgttattaaaatctttctcagtcactgatcaagtgaacggaggctaaatctccacttttattttgtaccacaaaggtatcttctgaggatttagtaaaacacatctttataagaaagattcacatacttttaataatgctttataggtgttaaacacacacatacacatggcatttgctgtttattacaaagcagtttgtggggtacaaatgaaatgttaacccctcccttcctatctataattgacttatttttacagatgtggaggttaaagattaaaagctgaaatgagggccaggcatggtggctcatgcctgtaatcccagcactttgggagtccgaggcaggtaaatcactcaaggccaggagtctgagaacagcctggccaatgtgtcgaaaccctgtctctacgaaaaatacaaaaattagctgggcgtggtggcaggcacctgtaatcccagctacttgggtggctgaggcacaagaatcacttgaatccaggaggcggaggttgcagtgagctgagattccaccactgcactccagcctgggtgacatagcaagacactgtctcaaaaaaaaaaaaaaaaaaaaaaaaaaggctgaaatgacttgtctaccttcacctgcaaataaatgaaatagtcaggactcgaatattcattcaagaaaaccacaatattcattcattcattaaacaaatgttgattgattactacaatgtgctagggactatgctagttcctggaatacagcattacataagataagcatgctccctgctctcattgagttacagtctgccaaaggagactgttaaaaaaatcacgtggttacataattactactgcaatcttagcctgcaaggcttacaaatcaagtgccgttttcattaaatcaggaagacaaagttattcaaaacatcaggctccatctgagagctgacttttcagttttatatattcatccatccctcaaacttttttgagtgccttttctgtaccaagccttgtgcttggcatcatggaaatgagaattggtactagaagttctcactcatgaccctgggcaggcccaggctgaggcacatctccccaccccctagctcagacccatcccttcctttccaactcagaagagcatgttgaaattcaggggaataaaaagacactatgatagagataaccatggatcatacactcccatttataagaaagggaaatcattctcaaactggggtttttcacttcttccaagtaatctcagcacagtggttgttaataacaattgggttagctatagtaagaaagtgtgtgtgtatgcatgtgtgtgtgtgcatgtgtgtgtgtgcgcgtgtgtgtgtcgtatgggcagggaggagaagtcaaagaggcaaagaaaagactgaggaccaagcctgaaatgccaaaggaatagcaacatcagacagaaaggcagagggcactggagatggggagcagcaaggcatgtcaaagtgcacaatgtggtactttcatcaaagtggagtaggacagcggttgtaagtcagatagacctgggctttactcctggctctgccacttgctgcatctctttggacaagtaaaataacttttgtgagcctcgatttctcacctctctgttgggactaacaacagtatgtacttctagggctgaggtgaggattaattaagaaagtacatgtgaagtgttcagtagcttggcacattgcactcattaaaaggtaactgctgttatcaccgttgttgcagttgtaacagcatcactgctgatgggcattcagggagctacgagtgtggagttaagatgtaggagaagggctgaagctggagctgtagacttggcagccagccgcacaagagggaggaaaagtgtgtccctagaagtggaggacagaccctggcatcccagcctagggaaggaaagaggtggagggaaagcggaggaaggaggtcgagctgcaggtatacacccacagaggacagtatgtcaagaaggcatagatgctgcaggagatggagtcagttggggcttagggaggcatctcttagagcaggtgatcaggaggtgagctgctatctggggcaagagcttccaggcagaagggatggcaagtgcaaaggtcctggtgaggtaagcaagggcctgaagtgttggagaaactgaatggaggctagtgctgcagggatggagtaagctgaggggacagtgggaggagctgcagccagagataaggagggtagggagggggacagtttggacaagacccgttgtccatctggggatggagagccattcattcttacacttcacttaacaagcatttcttatgtgcctactatgtgtctggcactatgctaggtactgaggatacagtgataagcaaaacagacatagtccctgccctctgcatgaagggtacagtgagaaagatgcacaatgatcagataatcacacaagttgacgtaacaacaaactgtcacaactacatggtctttcaagaggaatcatcaggggtgctgacctggtctgggggcttcggggaaggtttgcctatagaaataatatctagtctgagattagctaaataacatggagctaagcaggtgaagagggaagagatgttcttgactgaaaggatgccaggggcgaaggccctgaggggagaggaccagttggagttggaggccagaggtccggaatgcagagaaagggagaaggtgcaaggtggggccttgggggctgcagcaagaattggggtttttatcctaagaataatgtgaaaacattgaggagttttaatcggaattacaggtgttttggaaatgtccctctgacaatgtggaagatggagtggaggtgggagggtgagcagggcaggatggactcaggaagctactgtaagtccggatgagagatgacggcagcctgaactagggagaaaagggagagaagtggctgtgcttgggaagtaatttggaagcaaaatctgtaatatgtggtaaagggaaagagagactgtgtccaaaatagcgtatgcaaaactggatacttgcctaaagaaattgtaactgaattaatcaagtctttagaagcagacaggatagatgaatagattacatgacactacaagacagaactcaaccaaatcagagtgtaggacattccagggaacaaataccatgatgttgccaataaataaatggcacaaaataggggaaaaaaatatttaagaaatagaacaggacaatgttatatctttcatgcaatgtgtggaccttgtttggatcctgattcaaacaaactaaacatctttgggagaaatagaaaagtctgaatgcagactgggctgtagatgatattaaggaattactattcattcagttagataaactaatggcatggaggatttaaatgttgcatgcatattgtgtgcgtgtgtgtatacatgtacacatatgtatttaaaccttgccagtgagaaatgcacactaagtttttaggggttaaatgacatcttggatttgtttgaaacacttcagaaaagataaagtggaatataatatattaaactggcaaaaatgatgccaatttttgaagctgggtcatgggtgcttggaggtttattatactacctgtcttggggtatgtttgaaattcttgaaaataaaaaagtgatcaataaaaataaaatgatgaaaaatagagttcatactgaaatagaggacacaagaaaagaagcaggtccaagggggaaatcacaagttcaacttggagacctctgggccggaggtgcaaaagttaagtgcagacagtgaatctgcacagatgggaatttcgcagattcagtgaatctgtgggcctggataaactacccggggaaggaagaaagctttgtgagaagagagcccaggactagacatgaagaactgagaggcgtgatgaccaggcagagggcaggagttttgtgactggggaggagcagcagaaggagggatcacagaagccaagagaagtgagtgtttccaaaaggagggcgcaggtgacagaatcgaatgctgccaagatgtcaagcagatgagaaacatgacaagtccactgggtttagaatcatgcatgggggctgcttaggctgaggtcaggagcggggtgaggagggaatgggaggtgaaggaaatgagacaaagaattgggcagcactttgaagaagtctgtctgtgatgtgggagaaagggcagtggctcaaggagatagagtggaggaaataagaggtttgttgttgttgttgttgttgtttttaaggtgagacattcttaaatgcattaaaataatgagcaggactgggcatagtggctcacgcctgtaatcccagcgctttgggaggccaaggcgggtggatcacttgaggtcaggagttcgagaccagcctggccaacatggcgaaagcccatctctactaaaaagacaaaaaattagctgagcgtggtggtgtgtgtctgtaatcccagctactcaggaggctgaggcacgagagtcatttgaacctgggagccggaggttgcagtgagctgagattgtgccactgcactctagcctgggcaacagagcaagactgtctcctaaaaaaactgatgagcagaatgatgtagtagagaagaaaaagctgaatatacaggagaagggaccgtcggtaatgtagatttcctgagaaagcagcaggggatggcaagaggaaggatcgctcatggattctatcaggaaggaggaagagatgaaccagacaggtagctgagtgctgatgacgtccttcctttgtgtgtgtgtgtgtatgttttttttttttccctgagaagtaggaggtgattccacccgctggcagggaggagagagttggggaattggaggcgtaagggtcttgaagaaggttggagatagccatgagaaaggaaagagtcagtgaccagagagaaatggggttgcccagtggggtggaggttggtgattttgtgtctgacaggagacagtgggtgaaaggctgaaccagggcaggctaggtggtgttggtggaaggcaaggatggatggtcaatggggagatgtccctgtgtctggcacaaccaaggaggacttcgtggaggagaacgaacctaggcctgtgagcagatggctttgatagcaagggccagaaaatggtgcccggtgtcttctcaacttcaaattcccatcttattgcaacctactgccctgctcagtgcttcgcctctccagttccttcctgcctcctgttctaatatggtctttgactcttggaatctaatatggtttcaaggcccatatcagggttgtttgctaatttaaaaatatgctgttgcttcccagttcccaccaaatggcgagcagtttggtaagctgggtgggcaggcatggcagttatgttgcaaacagggttcctgcctgcctgggaggatcagacaggactgggctttctaaggcccacggcccactgtcttcacccctcacacaagctcttcaaaagcatgaaggagcatgttttccttgcatctaaatagttctggatgccaccaagccttgcagtggccatcagtgaccagcagagtacattctattcgtgcccttcccagacccaccggctctccacagggcttggactgttggcactgtctctgaggttgctattacaaatggcacctattggtagcagccaaaacatgattaggggaaataaaaccctctaggggcctgtgggaggagctaagcaacatgtgcagcacttaaaactcatcgtttctttttctagcttaactcaggtgattcgaaagtttgccaagcaactggatgagtggctaaaagtggctctccacgacctcccagaaaacttgcgaaacatcaagttcgaatgtaagtactgagttgagagcgggatggaagagagaattacattttagtgccaaatattttacataagttgttaatagtagcagcagctactgtttactggttgactataaagcaccaggtattatactaattactttacatatgtaaatatatttaatcctcataaaatgtttattataggtggcacatttcttcctttacagaagaggaatcaacttagagaggtagtaagtagcagagacaggattttctcccaggtctgtctgacaccaaagtttctgctcaccaccaccaccatcctccttatctcatttaatcctcatgctgcctctgcgatgtagaaagtagtatccctgttctacagatgaggctctaagaggcaaagagagttcccccaaagccacgcagccacacagctgtaagtaggggccaggaatcaaactcaggtctcagatttccttgaagttcctgcccataaaatggtggtagcaggagagagagaatagcttaagggcttcatgcattctctgcctaattagaaagccaaattaatatttctcataaagggattgagactgtgaaccttttctttgctgagtgttggcacccattccccagcattagttttctaattttctgtttcaatctgcctgtacttgcagggagactcatgtaccgttcgtttgctgctattaaacaaagatgaaatgattttcagcaaaacaaagttttaaaatatacattttttaaagccccatttgaatacaacggcttgctattcctgcccaaaataagtgccagtgaacaaaatgaaggcgatcaaattaccctctctccacaggcaaagggagccctttcagacgcgctttgaggctgcctgcagtggccatcacctattgataaagcctgctttatttcatggctctcagctcttttcttttcatgagcactaaattccacatcacaaagttaaagaaaaagtaattaaggagaaggattaacgattgatcagcctggaaaattagaagtccatctgccccctcccacccccattcctccactccacaccttatttttcaaatcaagccagctctgagtacaaattagaataatcctagggaaatttctgactattacttgaccagttcagaaattaccaagaagaatgcccccgcacccattttaattatgccgacaaaacaaacctgttcaaagtcggcggcaaggaggtttgttggaccttccacctgtgtgtgtctggaggaagctgttcttcccagggagcccagcctgggagtgtattttgagaatgtgcaaggggtggaaacaagtcccactgcaaccactctgtaagaatgaagagctagggcaggcacatgtcttgtctgcgttgaaatccacagatataagatcaccctacttcaaattatcagcctattatgtcagtgtaggaaacaagaccttttcctagctgcagtcatcatcaaaacatgcaaacaggtcatggagatcacttgataaaaaggacagattatgaatgcaaagccagggttccatcccagaagcacctcctagccccacacaccgctgaggctcaatcaaggtttactattagacatactactttttaaagggacttcttcaaagcttccacttgattcctgcaattatttacggggagaagtgattgagcttgcaattagcgaaatgaaagacaagtaaataattgcttttactcacggttgattgacgccaccatttctcacacctgcgagtgtatcgtgtgcatgactttgaaatatgtaccccaaatgtcaccattaggaagtagttgttgaagcccacatgggagaacaaagaatcaagtgcagggttttgccagtgggtacataaaatgggattgggcagtgagataaacgtaggcaaaataagcaggctactttttgaaatgtgcccctggaaaatccaagttagaatcataaagcatgcaaatatttcaaactaattcttttctccttgcagtgtcgagaaggttctcccaaattctgagacggcaaacatcactaaatcatctctgccaggtagctgtcctccattatgtgttttaatcactgctgagtcattgcaaatgagggggcaaatccacaaaaacaacctcctgcaggatctttcaggttaacagggcactctctctattattttttaatttctacagataaggaatgaaaacattagccaataactagtttcaactaatatacaaaataatttctggtatcagttgccccttaacctttcagatatgttctaagtccacagttctgtgtttctcttaattatccagcccaaaatgtatgtagtggttgaatcaaatgattcaaacagattaagaggatgatttgtttgttgtatcatctgagttcaaagccacataatatattcaatatttgcctaattttgtttagtttttttccagatctgcattatttttagcacaaaagtgacatatgcttgctttcaaaaacatttaaaaatataagtgtagtaagtaaaagtggaagatcccactccatgcccctatcaactctgtagttatagcttgatggcatataactacatttctattaattttgcactttaatgaagggactctaagtctgttaaggcaaccgattaacattacattaaaatattaatgaccttaaagcagaggtggcaaaccggtggccacaggccaaatctggccctcagatatgtggggttattgttgtttggtttgaatatgttcaaaacaatttttttcacatggtcactaacagttggaactgggagatgacagctaaacacccacatttttctgtagaaaaccttcaagggctgacaacttgctcccagagtcccatttccccagggcagctgtcagctgctgggccaagcttctccacagcagccaccgtcctcattccaccaactctctcacacttggcccacctcactcctgaatgtcacctgcctgcccccttcctgtgtttctgtttgcagcctctcctttaaggtgctgttggttctgggtgggttcaaggtcaaggtggtagggaggggtttctagttagagtggcctgaaggagggtcccagaccaggaaccagaaagtataacacaacacccacatatacctcactgctcctgtcctgcccctggcatggacagcacaggggatgatttggagaccagagggaaactcatccagattcatgcaggctgctacagaggctacacctgggcattgttctggtgatggtgcagagcctgacagattaatgggattcaggaaagaaggtgaatattggcctaacaaagaaacactgccttatttctgaggatgcatgccagcatctggttcttttttccagcttggaagagtggctcttgggtcatatcagggaactagacatggttttggtgcctccctctggggatcagacaatttagagaggactttgttcctttaatgcacatgtagataaaagcgtccacacccatgcctatagccacgtgttgcacaagcgtaggggcgcacacacacgttccctctccaccttccgcacaaaaacagtatgtaatttaatcagcaaatgccccatttccatctctaccggaaagctttcagacgcattcccagatcagacagaggactagggttaaggctgggaatgaaacaccagctagtatcccagtgagctttcccaaacacacatacacagcaagtcagactaaacaacgtccaactgaagactcacctcaaatacttagacctaagattcacgtccaggctctttcagatacaccaggtaagtaagcacttggcattcctatctcagccattcacttcacagaatcttttgggtgcctactgtgtgcccaatactgtgcttagtggtacttgccctcagcaggaaaaaaaattaaaagtgttaaatgttatgaaagaaacagaatggaaatagaaaatcacaaggcattcaggtcctatgtagataaagtggtcagagatggcctttccatgggtgtgacatttaagctggagcgtacattgtagtggggctgctggggcaaggagggagaagaatgttccggccagcaagaacaccatgtgcaaaggccttgaggtatcaacacaatcactgaaagagaagcgatcggataacagtagccacttttattgagttccctgcactatgcactctgtttttcaaacactatctcaaggaatcctcaacagcagcccttctttaagaggtaagcactaaggccctaaacatgatggttagagacactattaaaaagcatgttctaggcagggtgcggtggctcaggccagcaatcccagcactttgggagacctaggtgggcagatcacttgagatcaggagttcaagaccagcctggccaatatgtcgaaaccctgtctctactaaaaatacaaaaaaattagctgggtgtggcagcatgcacctatagtcccagctactagggaggctgaggcaggagaatcacttgaacccgggaggcagaggttacagtgagccaagatcgccactgcattctagcctgggcaacaagagtgaaactccatctcaaaaaaaaaaaaaaaaaaaaaaagcatgttctaaacacttgcttacagaattcactctttggtaaacagttcatttcattgtaataaagtagctcacaacgcatctctgaaggaacatgctcaggaaagaaaaaaaaaaggtaggtactatcatatctccattttatagattaggaggctgaggttaatctacttgcctgccccaagtcagctgctcagcaacgaggccaggatttgaactaggttatgtttgaatccaggacacctgacctttccattcagttgttttcattatcattagagattcacctaactcatatattctacacctttgtgacctttaaagagttctacaattatttaactaagattttacttgtaattggatggtctgggtacaacaagggtttgtcagtatttacctttgcctagaaatttacatgcattaggagacttgacaatgtcttcgtgtattttaattttttttattttattaaaagacattttgaaaacatgcaaataaaggaaatgatcctagatacatatttttcttagcttttctcagtattgtttcaacttgatgatattgttccaagtattgttccaacttgcaaatttaagttcactaataagggttccatgaaaaagccacagctttaaagaaaaaaaaatacatatatataattattcacacactatacacatccctccatccactaacaaactactgagatgtatggtatagtttcccttttcctccaacctaattattcatgtatgttttaatcattatagcaacattttaaaaaagcaaaaacagaaaactagagcataaactgcttcagaatgtatttatatgaaaaatacacactttgaaatttctgggattaagttaggcccaggggtagcaagaacacttctaaatcccagcctgcagcttctcaggtactggagacacaaggataattcagcacagagctcccatcccacaggcttacatcagaaagctgacagatctctgggcttcatcccattgttccatggggtcaagaccaaagggactggaaacagcagggtttggtctggcctagcccaccctcgcagtttcttgtagagaaaaagagatgtgtggaaagaaccataggagaaaacagtgtctgcgtcttctgagttacagagtcttctggtgctttcctgaaattgaatttcccggaatttcagggtagtttgcaaaataccataagcagatgcattaacaaggcataaaaggaaatacagtgaaagggttttaacaacccatgagctaacgagttgattggattggattataggcatctcgaacagtgatccacagtgcagacatcacgttccaaatgctggaagactggaggaacgtggacctgaacagcatcaccaagcaaaccctttacaccatggaagactctcgcgatgagcaccggaaactcatcacccaatgtaagctgtcccaccagggattgttgtcctgtttttatttttaaaagaaagaaaaagtgtcttagtaaataccgaagtggcatccccaccctgttcttcccagcatctcttcctccttattgttccttattgttccttttaaatgagtcagtccagaaggaagggctgattgacttgagaggacatgtgtcaacactgctgggtaaagagtgttctggtgcaattgggcagcatacagtgtcatgcaaagggccccacatgtgacctgaatgccagccccggttccatggaggtggcattaaatatgagaacaaaagcttattgcctctctcagtgtatgtcagcctggggtcagctggatatgctgcctatttttcatttgagggtcacgactcagcccacctattggtaggtgaacctttcaatcacgttaaatgtctgagaagcaggtggatggtattttacttctgtgaatatatgttcatgtcccggtgaacaagggcttccaacatgcagactgcaggtatactgctccaaatatcaaccccatgtaggcaggatgtttgatcttggtactaaagcaatatgagaaggccagagaacaacatcattgttagcacatccctgctattcctcagatgcccatcccagctgactgcccagggcatccccccagcccaataaccctggatccataggcgtctacaggctacctccataattagagaacatcaggtcaggaaaggtgttgagagcatgcattcccatgttctcaatggggtgaggcccaggatcccaatagtgacactgcttggggagctgcagagaggctgtcccaccaagaagaggggtctttctgaaagccccaaggcccttcagatttcttagtatatgccttctgcactgctgtcttgagggaattctattcagctacccagtctaaacttgaggtgcctttaaacaaagttccctaagagggtcctattagagatctctttcccattaagcccttttcaaaagcaaatgtaacagccgaaatgtttgaacatgtggaccttccccagggcttctttcctggcttagcccaaacctcactcaggctgttacttcttccttcacagctgccccaagcccacttttcccctggtaagaattttagagatcatcactaaaataataattcagcttattgactgcctattctaagccagctcctgtgtcaaatccaatacatgcacggtcccatttaatctccacatcaaccccatgaggaagacactcttatcacccccactttacagatgagaaaactcaggcttagagagttggtgaacctaactcaaggtcatgcagccactaagcaatagagctgaacccaagtctggtctcacgtctagtcccagcttcatcaccaggccttagtgctgctcatattgtattcatgtgcacaggagacaaaaaaaaaaaaaaaaaaaaaaggaaatatgggtgagttttagaggttccaggatctttccaagtgcttacaatcatccttcctcttctgctttttcctgtcccctgatggaaagtcaacagaaagcatggccctgcacaccctaatagcactgggggtacctttgatcactgtgcccctaggaactcccaatgggccaggcacagagcaggtgtccagcaagattcatggaataccaaagagatgagtggaaacccagagttaacctagttcttagctctgcaaatcttcctagcagtgttagactcagttctcttcccgcctcagctcctttcatgagggacgaaaatgtgaaccagactcataaggaaaaatacaatcagtattgcttgcttaaaggaccaggctctgagcctttgctggagcaccatggaggtcactgctgcctctctcaagaaagaaccttctgtggctttctcttcaagttcctttaggtccagggcagaatggtgccctttaaagctgtgattgcattcttcttctggggaagtaaatgctgtggttcagttcaacccagctagtccttactgaatgcctgtcctaagtcaggtactgtattagatgctggccaaagggcagtgaataaaatggacacatcccttcccaacatggagcttacagttaatggtaaataagacctcaaacatgtatttacagatgtgttgcatcttaccaaagagaacaatgtcatgtaatacagtgctgtgaagggggaattgagagagggtaccaagcctcaaggcagtccagcacatgtgcgtcaaccctgtacctcctaaccagacagctgggaagtccctgacacacagggagttggaccaaaggtcagcttgagcagggctgggacaactgtgtgcagtgctcttctttcctcacagccagctgacaaatctgcaaactcttgcttagggggttaccatcacctctgtgatatagatctcagccggcaatgctcagcttaccttagattttaaaagtgcacattagtacttaagcaagctgattagaatgagttataattgtaactgcccaaggtctgctgggcatcccagacccatgtccaagttctgttggctgggatccctggggctgggatgcccaacagaccttggttcaaaccttgctcttacacagctcttacacagcatggggctggatgcccaaaagaccttgattcaaaccttggctccagtacactgtgaccttggtttccatttctgtaaaatgggactaaggtgaagggattaaatgagactatctgtgccacatgcttggtacacagtctagtgttagcatagtgaagtggttaggaggcaagcacttgagtcaggatgtgtttgaatcttgtctccgcaattcactagctgtgaaagaacaacctttggaaagttactcatctttgtttgtctctttcttcacttgtaaaatggaggataataatcgtaccaacctccatgggttgttcatccattcagtcaacaaacatttgagcattctagtgttatgaccctctggtctcagaatcttacttcttgtagcaagcgtcaactaagtaaaatagagcaaagtgtccagtcctttaaaatgagagaacaaaaactgctcaaatgaaaatgaaagaaacgtatggatcttgaattgtggtttgatttattgatctctgcatacagaaacacaaaaatgtgatgaaaagagatgtttcaaactagagatcaccagagccatgtttctattttctagagcacttcattgattaaaaagcacttccagccgggcgtggtggtgcacgcctgtaatcccagcactttgggaggccaaggcgggcggatcacgaggtcaggagattgagaccatcctggctaacacagtgaaaccccgtctgtactaaagatacaaaaaaaaaaaaaaaaaattagccgggtgtggtggcgggcacctgtagtcccagctactcgggaggctgaggcaggagaatagcgtgaacctgggaggtggagcttgcagtgagccgagattgcgccactgcactccagcctgggcaacaaggcgagactccatctcaaaaacaaaaaacaaaaaacaaaaaaaagcacttccagattcagttatctgacttaaagtgaagacaggttgtaaagtggtaggattatctctctaatgaggaaactgaggggcagagagactggttcacttactcaacaagtatctattaagcacctactacatgccacacagagaggctgcttgcctgatacagttgtggtccagaaacatttgaattatcacatgtgccctaccctgggcagagagcaagagagcagcaatgcctcacccattaattcaagcaagaatttgttgggtaacaactatgtcacagataatgcaccagctaatgaagatatcagacaaagaactagcagggagacacacatgcccacccaactatgccacagtgccattagtcatataataaaggtagaaaaccgataataaagtgctatgtgagtgcagaggaggggtgatcagttctgcgggcaaggggcatggaaggttaaagggatttcataccagggccatttcagctgggacatgaggaaccaagtagtgggaaaagcctgaaaaaaaaagactaaggctatgaaaaaagcagggcttgctggcggaatggcaagtaatatgggatagccacagtttaacatgttcacaggcatggaagatgatcttggaaaggtaagttggggcatgttttataaagtcttgaatgctctgctaagaccttggagttttatttatttaaagttttactttattcaaagttttgttcctctgttcttttaagacgtagctcttgttaaatacaactgcagtgatgcgtgtggggttctcctttgtttgacagtatatcaggagtttgaccatctcttggaggagcagtctcccatcgagtcctacattgagtggctggataccatggttgaccgctgtgttgtgaaggttggtaaaccggcacctagcgggcagccttgggccctgcagcccaccactgccctctgtgaacttggccaagacaaagccctatggtaagctatctgaacagggttttgaggagaggccccaggaggtggaggggtcaggaggcaggactcttgagtcttccatccctgattcaaccaggtcagcatctcttttatctgctctatacactgagtcttggtataagatttcattttttaaagtttttttgctgctacaaacaaaacaaaaaccattgctccatagcattgactttgaagaccataagccttcctgtcatttttctgtatttatttatttatttttgagacagggtctcactttgttgcccaggctggagtgcagtggtgcgatcacagctcactgcagccttgacctccccaggctcatgtgatcctcccacctcagcctcctgagtagctgggactacaggggtgtgccaccattcccagctaatttttgtattttttgtagagatggggtttctgccacgttgcccaggctggtctcaaactcctaggctcatgcgatcatccgcccaccttggcctcccaaagtgctgggattacaggcgtgagccacttcaaccggcctcatttttcaaagagacagtaataaatgaaaggtcaagtcgaccactattaaagccatttactttcttgtaggtggctgccaagagacaagggtccttgaagaaagtggcccagcagttcctcttgatgtggtcctgtttcggcacaagggtgatccgggacatgaccttgcacagcgcccccagcttcggtaaggccaccccagccctccccatctccaagcactttttcctctgggcacggagcccagaggaatctaccacagtctaacttgctgtttctgcaaggtcatcaccctgaaacacatctcttctggggagacatgacattgttaggactttcagggagagagatggcattacatgctaaaggtggagtatcaatctgaaaatgagtggttttgcccacagatagtactatctgagcttaaagaagaataaattgcagtggctgtactccccatgcctagatgttcccagtgattgctgcttccaaagcacaatttcatagaatcccgtatttgtgcacttcccaagactgggcacatgaagaaacctctgagtttgaacacttgcaaatggcttgattgaccatactcttgctgtgggcagatgaccttaagttttctttaaaaatgtactctagtctaatccctaaaagagggcatttgcattcactttcccttttgtttcactgaccctttaagtcttcatcacctccaggagatatccccacctcaagtcttcatctgctgctttctagtataacagggcttgaaatctctgcccaaaggtactgataacagtctctgcgggcagcaacctgattactgaatcggggtgaatgttatgatacattgtaggacagttttctacttttcaccagaaagaaagcagtatgtactgagtccaggtcatcattggcaaactgagatgggacttttaggcattatccagacatttgaaatcccaaaacattttggtttcaattttctaggcattttcggcaaaggggcattggtaaattttctgggtaattgcttcagttctctatttccctttgcaagtaagggttgtggttttgtttctcattatctccaattaagccaatcagctctgggttttgctgtgggtttaatttgacacttttccatctagctttttatggtcttgtcaccattttccagttgtgctatacaacgaagtaaatatgtgggaaaacaaagaaggcactattttttctaaacagccctgtccatgaaagactgtgtttacccacttggagaagtgttttgttgtggatttctttaatctcagcattggaaggttctctgaacctgcctgcaccatggctacagatggaaattctctttgagctgtatatggaaatgctctgctgactgctacctgggcagtgccatcaggcatggcattttgatgacttccagttcagcacagttagtgttagcacatgttacctctagctctggaaaaatcattcatgcagaactgttttcccttaagtgaactgttggaaaatatttgagatttcttcattgcttccaagtcagagaatcaacaatatcacacacaaacacacatatccacatccacacagcgagcatcctctccatgctttatcctttactcttcaatttgcttattcttaaactgaccacgtatggtagcaggtgcctttcattagacagggaaagtaattcccttgcaatattctttgaaattcatctgtgcttactgagttaacagtcaatgtaaaaaagaaagcttgagcaggagaatgattaggctttatgaatgggttgaatttattactaagaaatatggttccttgaaatgtgtttctttttgaaccacacactcttttgggatagatatactggaaactcaggcaaatggcaaaaaaagatgatcacaaatcacttagaaaaggagaaaaagagatattaacccagtctcagttttacagtatttctcaaccctgagtgggttgaaataatacctgtctccaagtccatttagcaaactatctgaaatggcccagctcatctgactcattgttgaattttgcagcttggggtgacaggcaagttaaaagagtttgcagcagacaaaagcccagctccccctttctgcttatatatgtcaaagacccagttggtggttgtgtttgggtcatgtgttccctgtatgaaaacagctaattaggaaaaagagccctctgttccttggtcccctcccccagccacaggggccagctctatatatcttataactcccacatggtccttgtcgctgtgaatgggtacagggtttgtgtgtcagcgtagcaggctgaccattacaatgatcgtgtggaatatcacaatgatcctgtaggggactctatcacctcttcccagaacagcctctttcaaaggtagttgactcctttcttctccttaattccttttcactctcttctccttaattctttttcactgaaagaacctatgctgtgaactaaagtagccagactttctttctttgctgcaagcagtgtttctagcaaaattagttaccaaaggtaggctatcaggcaaacttttagtcctaatgaagcagagcaaatcaaagttttgtttttaaaaaacaccatctttttagtcgactgatctgatttcagttcctagagtacctagatctcaagttggtgccagcgcctttaccttttcattctgggttttcagcaaatgcctgcttatctcactgttatgaacatctggaaggtaataatagttcccggaagtactccagcatatatcagtttataaagcagcctgggtgtgacagctgaggggcacaattgcacaacacttccacagtttcacttttttacacacctgttgtctgacctagcatcaaagctcactcacttgggcagggctggggagaccatgtgggcatgtgtcagggagcggctcccagaacaagaggccatgaccaagccttcccaactgcttctctatgcttagatggcctggcccagctctcttttagacagaatctgctaaattgcaggaccttaatgttcgcaatgtcattcaggcccccaccaagcactaagagacaggaattgctttccctgtagtcaggagtggaagtaaaaacccagagaagagaggacttgcgtgtggactcagggaagtggcagattgaattcaacccgcaattgttcccatgctaaagctggagtttttttctgccatgctacactgccaccacctcatttacctttctttaggtaaaagaaaattaataacaacacagaaacatgtattgagggccgaatatactttagacattacattttctcaattacttctcacacaaccccgtgaggtctgaattactgccctcaatatgacagaccaggaagctgaggtagtacttgaaggatttgcttaacattagagataagaatgaagcaaagacaagataatgatgactattataagaaatattttggaagcacatactatcattgaattcttgcattaactctgcaatgtaggtaataatagacactttctaaagaggtgagaagggagcttggagaatttccttgcacaagatcaatgcagcaaatgtcagaattctgtttcaaaatcaaacctgcctgaccgcaaagcccattcctttttgattatcacaattaaggcaaatactctgggctcagatgcatgccacaatagagctagaaaaatttatttaatccacattgatggtattaatatttttaaaatatccatggattaagatttaaaaatttaaagctatgagagaaaagaataattattagactgtcatgagcagtaagagatgccagaagacaatggagtaatatcttttaagtgttgagaacaaagaactgtcaactattattcaagagtgagggcaaaataaagacataatcagttatacaaagacagaatttggcacccacagatgttcacttaaaaaaacaacaacaaaaaactattaaaggatgcatttcagctgggcgcgatggctcacacctgtaatcctagcactttgggaggtggattccctgaggtcaggagtttgagaccagcctggacaacatggtgaaaccccgtctctactaaaaatacaaaaattagccgggtgtggtggcgggtgcctataatcttagctactcgggaggctgaggcaggagaatcgcttgaacccacgggggcagaggttgcagtgagtcgagatggcaccactgaactccagcctgggtgacggagtgagactccatctcaaaaaaaaaaaaaaagccatagctgaggtctagaatacaagaaacaacaatgttctagttattgttgccattgctgtgtaataaattacctaggcttaatggctttaagacaaccattttattatgtttatggattttgcaagtcaggatcatgtgtcagctcacagttccacgtgcaagtgccccaaatgtgaagtcactttgcttttatgatcccttcttagatacagtgtaacttccctcatactctattggtcaaaggcagtcccaagcctaccatgagtcaaggaggcgcacagaccccaattgttaatggacggcacatcaaagaatttagggaccctgttttaagatgaaagaaatttaaaaatatgtaaacatatttaattaactattgaatgtaatttaaaaactaaaaactaatttgtatatgtgttttaaaaagttaaaaataagttctaggtaaaactataacatggagtaatgagaagagaatcttcaaggaacagttaaagcatgctaatgtctttgtcttttttaggaatactaggtaactttaggctttgttggagaaatttacagtttggatttaataaatgtttagcatatatgttaataaattaaggtatcattactaaaagaacacaatcatgatttatggaggaaaatggaaaaatatgaaaacttaagagacaaaacgttaaatggaaaagaagaattgagaagataaaagaagcatagaaaatggatggtaaatgaaagcacaaaatagcatggtagaaataaagaccaaatgataatcacaataaaggagaaagtctcttcctccaaaaaaaattaggcataaatgtttttataggcaagtttaactaaacttataaaaaatgtaaaatctttagtctatgaaaataaacatgaaaatcaatatttcaaagaataaaagaaaagaagaggccgggcgaagtggctcacacctgtagtcccagcactttgggaggatgaggcgggcaggcagatcacgaggtcaggagttcgagaccagcctgaccaacatggtgaaaccccgtctctactaaaaatacagaaattagccgggcatgttggcacgcactgtaatcccagctacttgggaggctgaggcaggagaattgcttgatcccgggaggcagaggttgcagtgagctgagatcgtgccactgcactccagcctgggcaacagagcaagactccatctaaaaaaaaaaaaaagaaaaaaaggaaaaaaaaaagaagaagaaaatctgttttcagtgactgcaaagtttaggacatcctggcccagcctaggatgtctgatctcattgtcctcagtgctgctttgcccacctcattcccttcaataaaatggtttgacctgcccccgcaaaataaggaaatgattgtattcttttagtaatgataccttaatttattaacatatatgctaaacatttattaaatccaaactatgaatttctccaatgaagtcaaaaattacttagtattcctaaaaaagacaaagaccttagcatactttattccttgaagattctcttctcattacttcgtgttatatttttacctagaacttatttttaactttttaaaacacatacacaaattagtttttagtttttaaattacattcaaaataaagaaatatacaactcattttacaaagctaacataatctcgatttcaaaatctggcaagaaaagcagaggaaaagaaaattatgactcaaccacactttttttttgagacagagtctcactctgttatctaggttggagtgcagtggtgcaatgtcggctcactgcaacctccgcctcctgggttgaagcgattctcatgcctcagcctcccaagtagctgggattacaggtgtgtaccaccacgcccagctaatttttgtatttttagtagagagggggtttcaccatgttggccaggctggtcaggaactcctgacctcaagtgatccacccacctcagcctcccaaattgctggggttacaagcatgagtcaccacacccagcctacacacattttttccataggtgaaaaaaattctaaataaaacactagcagatcaaatttagtggcaaaattttttaaatcaatattagactatgccaaaaatcctagtaggaaaaattaccaattaacatactatattaataaaaagagaagaatcataaaatcatcattatagatacagagaaaaaaagcatttgatacatttcagctctcaggtatggtttttaaaaaaccttttagcaaactaggaatagaagggaatttaatatcttaaagggcatctacaagtctgcagcaaacatcacacttaatggcgaaatgttagaaaatttcccatttctatcatgaaaagacaggaatgccttctaatatgatatctaataaatatgtactggaggtcctagccaatgccttaagaaaagaaaatgaaatagaagaattagaaaggaaaacacaaaattgtctttatttatagatgtcatgattgctggcaaaagagaatccacaaactaatagaaccaatgagaattcagtcaagttactgaatttagtttgtttttttttttgagacagagtcttgccctgttgcccaggctggagtgcaatggcacgacctcagctcactgcaacctccgcctcctgggttcaaaccattctcctgcctcagcctcccgagtagctgggattacaggtgcgcgccaccacacctggctaattttttgtatctttagtagagacggagtttcaccatgttggccagccttgtctcgaactcctgacatcatgatctgcccgcctcggcctcccaaagtgctgggattacaggcatgagccaccgcgcccggccctgaattcagtttttataaaatcattggcattcttaatttcactaactcgaaaatataacttaaaacatacacattcacacaattcataatagcaaaagaaactaaaatgtacctagaaataattctaacaaaaaattggtggtgattacactggtgttcattttagaattctctatatttttctatgatgcatatttttcataagaaagatgaaatgctttgattctaccaaatgcaatcaactatattaccatataacaataacaaaataaaatctccttttgtctctaatcctaatgcctttttccataacaggctctgctgctccctagctctgtgactttaagcaagttattcaagccctctgagccttcatgtcctcatgtattaactgaagataataccttctttgcagtgttgttgagaagttaaaagagcttacttagcgcggtgcatatggaagtagtcaatgcttgcctatttgattcatacatctaacacatatccattgagtctctattgtgtgcctggcaatgttgtagtcactgggtataaagcactggtcaagacagaaaaatctctgcaagatagagcttacaatctagtggaggaggcatgcaataacaattaagttaaatacaggttatagtatttaacttcgatggtgagaaatgctaaggagataaataaagtgggatgttcgctgtaactgcctctctcctcttgtctttggtgtctctctgtctctctcatcagtctttctgtatctccttttcattttcctgtcttcatcgatattcactatcctcatcgctgcgacactctggcaatgaactgtttactgcccaataatcttaatgattaatttctgcttagtaagaacacttagcttctgtggagtctgagactgagctttatgcctcctttgtactcagagcacttagcacaatggtaagcaggtagcagtagctctacaaactcttgttgtttgaaggattaaaatttagaatggaaaattaacagacaaactggtagctgatcagaggcattaatgaagagagcttgaaggcccatgtcaaatccgcactttccctaaagtaccggcttccaagttcagctctgatgttttctaagagtaatcttaggcaagtttcttcacctcatcagatctttgtttccttgtcttataaaacaagagaatggtataaaatgatttctaagttgtttgttcatcctaaaactactggtttggatttttatcatccaagctttccatgctaattcattatttcatagtacatttctctctttctatccatgttgactttagatcaacatcccagcaagtaatttcttcattttggagaccctttccttatttgatgctatcttttgacttgtttgactctatgaacaaaacaatcatgtcatgagatcttagaacatagcagcaaaagggatcttagcaataataataatagctaccaattattaagcatctaatatacacttttactcattttagtacttctgtaatgtacattttactgtccttttggagagctgtagcacataacgattgaggagcaacttcagagtcagacagtccagggttcaagtcttggttctgccgcttaatgactgtgtgacattagacagctactttacctccctaagcctcactttcttcctttgtaaaaggaaagtatcacttatctcacatggttgtgatgaggattaaatgccaaaataaatctctggtggtttacacagtggctgccacagaggcagaggtcaataaatgtcagattttgttttcagtatttataaggattagggagggtaaaggaactcatctaaagtctaagctactaagtggcagagctaggatctcaacctgggcagtttgatcaacagcgcatgtaattacccacacagtgctgtacctcctcagtggttcacaggatcccatttcagagaaacagttggaaagtttagttttagagactgcatctcacagtgattgagcagaacctggactttgctgaataccaaatggcattgaaaaacagacatagtactggagatggaagaaggatgtgaaggaggtgcaggacagtggaccttggccttgagctctgtgggaacaaggacaggagtttatggcaggctgtagagagagggggtcatgttcatgacctgctgagcatctagtggccttacagttaagccagggatcttcctctctagcctttctagaccaaaagaattaactgatctgagatgaagggtgtgggtgtatacagaagccaggtgcagttaaggagaaaatacataaatttcaccaaggagtgctccacaagcccccaactagcctccactaccttatgtctgagacttggagagacctagctcccagctcaagtggcccctgtaggggccaagtcacttatgccatctgggccttattttctcatctgtgctatgaacatattgaactaaatgacttataggggaatgggaacagattacggagccagaccaaactgaggcaaatccctacttgattactaatgaagagactcatttcctcatcggtaagggaggataataccatctacctcacagtttgttgtaaggaagaaacatatgttcagtgcttagcagagtttttggtacagagtaaacactcaataaacagtagatgtgatgatgataataatggtgatggtaatgatccatgatgaagacagaatgacaaaaaaaataatgccagagagtcccgtaaagtctctaaaaggctgggcgtggtggctcatgcctgtaatcccagcaccttgggaggccgaggtaggtggatcacctgaggtcaggagttttagaccaacctggccaacatggcgaaacccatctctactaaaaatacaaaacttagccaggcatggtggcacgcacctatcatcccagctactggggaggctgaggcaggaaaattgcttgaactcgggaggcagaggctgcagtgagtcaagacagcgccaatgcactccagcctgggcaaggtagtgagactccgtctcaaaaaaaaaagtctctaaaaaagcaaactagaaggaaatgggaaaaaagcaaacagtatactggtcagcttggagagaggtgagaagttttggacattttaaagggactgcaggatatctacatggagatgtcctattgggacctggaaacatgggatgggagataaaggcttggcccctctctctgaccctgggtccatgaggccttgattacagtagacattaactgagcccctaccgaaggtgcaccattccactgtgcatggtagcagcatgacatgcaaaaaaaagctggttttgaaataatgtattatctattaatcgtgtcatcttgcataagtgcttggcctgcaaaataagaataaaaatacccaccttgccacatggttgtagttattaaattagagaagataagactttgagcacagagactggcatataggaaagtctttaaaaatgactgttcacattcccttttacaaaataatctactctaaattgaaaaatgaagactgccacttgaaaagaccaactatttttaatgaattaccttttctaagaaccatgtgctaaatgaggtcttgaaaacatttagggaaataagtaaataacttgttgcagatttaaattttcaaattggctcctagaattatgtcaggtacattagtagatagcaatacaaggcaaagtccctgccatggacatacttaaagtccaattgggggaataatatgctggtggaagagataaaaatgagagacactatgttaataaatgccgaagagagtgagcggtgctcacatgaggatgaggccagtgggtaagcaagagctcagagatggctcggtgggtgccatttttgatggtgtcatactgatataacttcagcaaggaaaagattcacttgccacaaagtgttaatgacacttaccttatgccaagcactaggctaaggtgaggatacagccaagaactgcaacctatgaccatgaggagatcataattgagtggaaaattagactcttgagcagagcatttagaacactgtgtaacttgtgcagttgaccagacagagggggcatacacgagacagcacgacttactttctgtttgatcctttttttcaccagggtcttttcacctaattcacttaatgtttgatgactacgtgctctacctgttagaatctctgcactgtcaggagcgggccaatgagctcatgcgagccatgaagggagaaggaagcactggtaagccagcattttcctgggaattgcaccacttggtaatgttatttgtatccttacttctgtgctttatgtttctttaactctgtatctcaaagaatttagttatggtgaacaggttaagtggtatcaaaccaatcatgtctttttcctctttaaagtgggcatgtgggctgggtctggtggctcacacctgcaatcccagcactttgggaggccaaggcgggcagctcacttcagaccagagttcaagaccagcctagtcaatatggcaaaaccccatctctactaaaaatacaaaaaattagctgggtgtggtggtgcacaactgtagtcccagctgctcaggaggctgaggcacgagaatcacttgaacccgggaggcagaggttgcagtgagccgagtgtgcgccactgcactccagcctgggtgacagagcaagactccatctcaaaataagtaaataaataaataaataaataaacaaattaaataaagtgggcatatttatatacagaaattgccttgagtgtcatgatggtgatgggaaaccatcgaagagtttgacaagagagtgacatcacacagattagaataatatttcactttttaaagtcttttagagacacttgcctttacatttggttttaaaaacttaccctatctctatccacagcagaagtccgagaagagatcatcttgacagaggctgccgcaccaaccccttcaccagtgccatcgttttctccagcaaaatctgccacatctgtggaagtgccacctccctcttcccctgttagcaatccttcccctgagtacactggcctcagcactacaggtaatggaaagtccttcaaaaactttgggtagttaatgtttgaagaaagggctttctgccagcctgggcaacatagtgagacttcatttccacacacacaaaaagccagacatcttggctcacacctgtagtcccagctacttgggaggctgaggtgggagaattgcttgagcccaggagctacgatcgcaccactgcattctagccttagtgatacagtgagaccttgtctcaaaaaaagaaaaacagggctttctggaaaaacattcttctcccacaatctccaaaagataatgccaaaacctgggtatcttcctggatttgtgaatgacgtacaggtattcatttattcattggtacacattctgtatgctgctgttttcaagttggcaaattaagcatatgataaaatcccaaaactaagccactgaattgattataatgctatataacataaatacacaaacattttgaaaacaagaaagggaactctctgaatcaaaaactgagctgctttctttttctctggaaagggaggcagacaggaaactttacactaagctatggcaaccataaggaggcaagggctgtgatgtgagtgggtcttcagctaagctagagctgccgggcacatagcatgaggctgatgctaccgtgagactgtgtggaggcccacacagtccaagatatgcacaggagtctcataagattaatttacaaccaagaattacccaagcttggatacacacccaaaagaaggcagagatccaaacagatgtttgtacatcagtgttcctaacagcatttctcacaatagccaaaaggcagaaaccactgaagcgtcttatcgatggatgatggataaagaaaatgtggtatatacataaatggaatactattgaaccttggaaagcaatgaaattctgactcatgctacaactctgatgaaccttgaagatagtatgcttaatgaaagaagccagacacagaaggacaaatatatgattccatttatatgaggtacctagaatagtcaaagtcacagacacagtgaatggaatggtgaatgtcaggggctggagggaagggaaatgaggagttagtgtttaataggtacagaggttcagtataggatgatgaaaaagctctggagatggatggcggtgatggttgcacaacatggtgaatgtacttaatgccattgaactgtacacttgaaaatggtttatactgggcgtggtggctcatgcctgtaatcccagcactttgggaggccgaggtgggtggatcacttgaggtcaggagtttgagaccagcctggccaacatggtgaaaccccatctctactaaaaatacaaaaattagccgggcatggtagcacatgcctgtaatcccagctactaaggaggctgaggcaggagactcgcttgaacccaggaggtggaggttgcagtgagccaagatcgctccactgcactccagcctgggcatcagagcaagactccatctcaaaaaaaaaaaaagttaatatggatatatattaccacaattaaaagtcacccaagcatccgtggaagcccaattccatgaaggaggaacaacaaacttaagaacagagagagtctatatccaaaggaatgaagttaataggacaacctgaaaagtattgttaagatgagaactaaaaagaaatcagccaggcatggtgactcaccctgtaatcccaacactttgggaggccaaggtggaaggatgttttgaagccaagagttcgagaccactctggccaatatattgagacccccatctctacacaagctttttaaaaaagttagctgggcatggtggtgtgcacctgtggtggaggctgagatgggaggatcatttgatcgtaggagttcgaggctgcagtgagctatgatcagaccactgcactccagcctgggtgatagcctgtttaaaaaaaaaaaaaaaagaagaagaagaaagaaaggaaagaaagaagaaaaagaaatcatacccatgagagtcaagatcttcaaaaggaaatatataattgttgaaataataatttcaatagataggttgaatattagaaaattagattcaactgaaagagatcagtaaaccgaaagactgagctgaggagttctctgataatgtggcaaaaagaaatagtaagtataaaagtgatgttaagaaaaaggactgataaactcagaaattctaatattcatttaataagtgttccagagaaagaatagagagaaagtgaagatgtaatagctgagagttttataaaatggaataaagacaaggctttttagaccaaaagctctcattgaacatgtgctgaataaatggaaaaaaaaattacctctaagcccaatgaagaaaatcaaagataaaagaaatcttactagtttccccaaagaaaatgtatataacttccaaagaagagagaaccagactgatagcagacttctcatttgcaacattagattcaatacctgaaaccatacttttgaagtgtaaagaaaaaaactgcattgaaagctttggatctagaatcctatatatgtttattcatgtatatatgtacacacatgtatttttttttcccccgtgaggacattttatgtgccaagtcctgtgctgggtgctatgggaaataaatagattaatatgccaaggccttgctaccaagagggaacacaaggataaagaaaagtacagagacaagtgttatggaaggaagaatgtggtatatgcaataagtgagatataaactaatgctatgaggttcccaaggaaggagagattctatgtggctggaagtatcagggaagacctcacaaagattccaggctttatggagtggagggcttggtcaggctatgataattaattcattacctttccatccaaacctgctctactaccctcctgttacccaggcaacaaatacgggagtcagcttcaaatctttcctctccctcaactcctgtattagttagggtaggctaagctggtgtgacaaatagatccaaacacgggtggagttaacacaacagaaatctatttcatgcttgaagacagtactgctagggtattcagtcataaaggaggctctctgtaatgcagtcatttggaaacacgtgctccttcaatattaagctcccacatagcccagggcagtatttcccaaactgatccacagaccagcagtatcagtatctcttggaaacttattagaaatgctcttatctggtcctgctgcagacccaatgaatcagaaactctaggagcagagcccaggaatcttgttcagcaaacttccaggtgattttgatgctcactaggttaaggaccactgcctgagggctttgttaagtctgcaaccagctggcagaaatggaaaaagggcacggaggatgaaaaccgactctcttaaaagccctggcctgaaggtggcacacgtcacttccacttatattccatcagcgaggacttaatcacatggcctcatgtaacagcaagacaggctgggaaatgtagaatagcatgtacccaggcagggaaaggggaacagctttgggggcaacagcgggcattctccatcacacttcccaagtccagttgttctaatactaatctagactgatctgttccttcccatcccacttgtgcctctggttcaggccacccccacctctcatggacatccacagtgactctcaagctggtaccctgcctccagactctactctgtcctctcacactactcactaagtctcgttttcatgaagcctgtgcctcctcaaagtgctggggcaaagaacccactgcctcactctaaaagccttaaagagctctctttctcctaatcacttctcacactgttccttcttcttgggctagcctccttctaccctctgcctgataaaatcctactcacctcctttgatgtttccctcaccctccaagttagaatcttcctccagaccctcacagcatggacttaattatatcctaattctatttaggactgtttccagaatagactcggaactaaagttttttttttttttttttttttttttttttttttttttttgaggaccaaataaatagggtcagattgctccattcaggagcatttactcatttactcacctatctatccatttctccaaaatatatttctcaggtggcttctatgtgctaaacactttcggataggtggtgatataatagcaaacaatagaagtgtggtccctgccccctgggagtttatgtttagaggttaaggttcttgatgagcaaactgacagtaacaatatagtgtgaggagtgctaggttggaagaagggtcagagtatcatgggagcatgaaggagaggggagaaaaggtattccaagtagaggcaagagagagcatgttatttttaggaaacttaaaagtatatatcccagagacttttgattaattccttccccaaagtttcctctctctatggaactacacctacttagagaaggattgagcggatgcttaagaaactggaaggacttgctatcttgtgtactagtcaataaactcagtggccctctgtcagggacagctaaggaaattggattcttcaaagtattgaaaagctgggttgttgataaatggcattagatcaagctttgatttcactttgggtacacagctagagagccctcttctgtggaaatttagatttgagatcgccgtatttgtttatatagatgcgcctcaaactgtattttgttttctgctttgaggaggaagaatgtgatcaggctcccacctccctcccattttctttccatagtgggttgttgtagttcctgcttagaaggctcagaaaaagtacgtgtagtgaaaagaatgactttgttcactgaacattaaaagggaagagaatttaagtaccattcgcagctcttcatgcagctctcaggagttcttcaaagattgggattattgggcaaccatcctgagtctcctttctccctaaagaaagagccatttacccaaataatcctgcccaaatatccctgtcatcaccagggagacacacacgagtctgctagtgataatatcctaacttctgaaataaacagggaaattatacaaataaaacagttctgcattatgaagcagaaaccatttggatgaaatgtttctcaaagtgtagcaacatttcaaataaggagacagactcaaagggaataagggatgggagggaagagtgtgaaagaaagatgtctaggatcttctcatagttctcatccagctagtgagtgtgcctggctttctttgaagcaatgtggaggcctcaagttatggcaggtgtgatagacaaggccacaggaatatcataaatggcttcagatatttctgtgcaatgtgttcaagagccataaacgtagcttcttagaaatacaaatgtgaaacaggttctcttcagatgattttaagctttgaagattttggcacattccagctttgttctcagatatctccatggggcattaaaaatgtcatcctatataagactatgtatgatatttttctcaagtaccacttttgaaatactccattgctaaattagactggatctgggcatgtaatgtgggtcatggtcttggagaaaagaaacccaatttcctaacaacatgtatgattatataggcatattatattataaagcacaaactatttacccatgctagaaacctaaatattaggaaatctattacggtaggcttcttaaattttcattgaacaatagtgtaaattgtaaaacaattatgtaaatcttataaaatgtatttgccatgtttctttttttaaaaaagtcaactcagcacatggttttcatgcccagttaatttttatttctattttaaaattatcgcttgacttatatatcccatctactttccaaaaagttttgaagtagtttataataaaaacagaaaaatcaatttcgtaaaaaggaccaaaaccagaaagaaagaaagaaagaaagaaagaaaaggtgaggaaaattaaatgaaacaatggttagctttaaaaatttattaaaatcttattaatatgtgaaattttatgtgacccagttatttttttgggtttccagcatatcgttgatcagacaatgtaaatattaccaggtttgacttgttgagaatcaaggccagtcaagtacctgggactctttaacaaataaatgtcccactttggatggacacttctccatttttcagctgtgaaaaaggaacagtattatgtgtgctcggtggcacaaagctaaaattaattcattgcacataaccttttggcatccttcgatacaaggactagggaatacaaggtagtacagataatgagttatgactcactaggaaaacagtcactctgcttatctgtagctacgtctagttccatgtccacatttctaaatatattttattgactgtacttattaattgtttttttaaatggggaaagaaagggaaatgaaataaatttcaggtacctaaaattaaacctgatatatggccaattttggttgggtttacggcaatgtcatgataagaggctggttaaaggattccattccaacagatttccacaaggtaagatctagcctgtctgtccattttctccccaaatttgtaggcttgctacgctccctcatgacctggcaaagttggcaaagtttagaaaccttaactttctttaaggaaaactggctcctttcctccttgggagcatggcaggcagtgccaaactgatcagtctatttaacatgacattgggctgcaattctttaatggcatctaaagcaaaacgttaagctcctactctgtcccatcgggccaccgaagggttctaaaacctcgtttatgatgtcattttaagtattccctccttcagcaatgacaataaaagttaactattaaactcatgttttcaacttcccaccatgggttccctgcaacacaaaaccagcaaattaaatcattgagatactaggatacttaatgaaataaaagcgaattcctcataaatggccctaactgtagaacatctggcctgcccagctgcattttctctacatcagttgaggatgtaacaaagataaccgacccttagtctttccaaataacaaaagcctagttattctgagggcagctaaaccgagtgggataggatggacacttcagccctgccacagagtctgcgatgactcatttacaggacctcagagttgtcagtgctagtgaattcctccttctttcgtccctgctacttccttttctttaaaggaatggaatcacgaaaaataagctgggattgaaaatagattgtttaattgactctttttttttggatcacaaaatcaaatcttagcttgctgctgggactttaggctccctcattcattcatttgttcattcattcaacaaatatatatttcgtgtctaatttgtaccaaatcctgggagtacagaagtgaaaaagagtaatagtcacttcccgcatggtacttacattctagtggtaagagtcaatacagaagtaaactgccaggtaaaggtgtaatttcaaatggtcaaagtgctatgtgtgaaaataatagtgtgctatgaaaaagtataaagtggggacgcatcttagttggtggtcagagatgcctccctgacaaggtgacatttatctgagacctgaagttttacaaggagccagctacatagaggttgcggagggaaaaagaactttctatgcgacggggaaaagcatgtgcacaggcctcaggcagcaaagagcttggcatagtgggaactgacaaatgtgtataataaataaggaagagagtggcaggagaggaagttgcagagataggcagaggctagattatgcagcaacataagaaggaactgattcatttgctgccccggtcagttctgtcaatcagattttgaccatggaactattggtaaagtgtaactcaaacagatgaggtttctagcttcaataggaggtctctttagacacagctgtcttaaggatagataatagccaatgacggaggttgcagtgagccaagatcacgccactggcactccagcctgcatgacagagtgagactctgtctcaaaaaacaaaaaaaaagatgatagccaatgacatacctagagatacaggtaaatatcaatatatagtcttctttccctgtctcaatcatgaagattacaggaaatgcttgtttagtagcaaatcctgtcaagcaacatcgtccaaatagaactttctgtgatgagatggaaattttttctatcttagctatccaaaacagtagccattagccacctgtggctattaagcacttcaaatgtggctagtggaattaagaaactgaattttaaattgtatttagttttaattcatttaaatttcaatagccacgagtggctataggatagggcagagcagctctagaatcttgacacacttaaaggagcttacaaacaaaaggcgtaggttaggttaaaacttgagcaatatctgtgatggttcacagaatcctcctaaggaaaaggttaaagcagtggtctccaacctttatggcaccagggaccggttttgtggaagacaatttttctatagactggggaagaggtgggggggatggtttcaggataaaactgttccacctcagatcatcaggcatagactctcataaggagtgtgcaacctagatcccttgcatgtgcagttcatagggttcacactcctatgacaatcgaatgctgcttctgatctgataggaggcagagctcaggcagtaatgcttgcttgcccaccactcacctcttgtgcggcccagttcctaacaggccacggtccggtactggccctggggttggggacccctgggttaaaggattcagtccaagatctgaaaaaaaagggtacagccaggtagcttgggaagcactctaaattttcagaagtctgtagcagaatctcaaagcttcaggtttttgttgttgttgttgttgttattgttgttgtttttgaaacagggtctcactctgttgcctagcctggagtgtagtggcgtgagcacagctcactgcagcctccacctcctgagctcaagtgatcctcccgcctcagcttcccaagtagctgggactacaagcacacaccaccacacccagcttttgtattttctgtagaaatggggttttaccatgttgcctaggctggtctcaaactcctgggctcaagaaatcagcccacctcagcctcccaaagtgctgggattataggcatgcgacactgcgcctcgccagcttctgatttttaatggcccttaacatacagaatgtgtgacaggaggcagtatgttatagagctttgttactcaaagtgtggttcacagaccaaccacattgtcatcatttagaagtttgatataagggcctcactcccaatctactgaatcagaatctgcatttttaacaagatctccagtgattcaaatacacattcaactgtaagaaacattgctatggaaagggtttggggttgggcagacctgcattgaaatcccaactctgccacttacctgagcaagtcatttaacctcttgggcctcaattttctcacctgaaaaaggaggtaatactacttacctcaaaaggttgttgtcaagactgaatgggtcaatgtataaaaggaaatgagcatgagatatggtttatgttggatgatcattaattcatttatttgacaaatcattactgattgtctattatattccgagcacccttcctgtcctgtgcttaaaaccccttccaaaacaaagcaaccttggggaagaagagtgttttgttggggatgggaggggaagaaaatgttcccctgtagcagtttcaatactgtaaggtgaccaacaactgctcctcttgggatctttataggattctcaactatcaggggcttccaccgctatcctcagacctttaaataaatagaaatgtgaggaggggaggggggaataagagaaaaatatgggaattgaacaaatagggaagatttgctattgttttaccgacaaaaagcattagaattgtcttaaaaactaagcacaaactgtaagctgcgcagattttcttttattagcttccttagaaaagcagcagcagcaattctcactggaggtctcactggtaggaaagggaattcaaggggtgttcttttctgctccccaggcaaaaagggtttctcacccaagccagtaggtgttaatctgcttaagcctgcctgagtggatgtgttagattgctggcacatgtccatttaggggttttgttccccagaccacaggagcccatttttccaagagttccactagctttttgtttgataacgtctatttctagcagcatttactccttcaacaacaaattcaatggaacgaaaatttactgaacacctactatttggcacaccctctgttggggatacagagatgaataaggaacagttgctgtgctccggggctcacacaaaagtaactgctgttgcattctctcaggtgatggctattatcatgacttcttcccactgcttggaaaaaaacatgctttggtttccttggctgccccgtttcaatatccattgacctcgctgtgctcgcctgaggtcccagaggcttcaagggttaattacttgcttgctgtggctggttcattgttctcccaaacttctcaccctttctgcttccatttccaactctaaactttgtttaatgtattaatgtttttctttttacggaggcaatacacattctttacagaaaaatacagataagtaaaataagggaaaacactgtaaaactctcctcaatcccaccactcaatgataacccattttaataaacatgacattttaaaaaactgtaacagtaatataatttcacatgaagttcaaaacatagaggagggcaattatgcataatccagtcatctgagttgtgatcattttggggatcttcccttcccattttcttgtacttataaatcaagcctaacatgtagcctgctaaagtcattatcttttgggggaagaatatggaatagatgtgcaaagcaggaaggggtactttcagctgtgctggtgagtaaggacactagtaattttatagaaaaacatgtttagaaatttgccgtaattggctaaattactgttgctattcaaatgtttcatccctggtaatagaatctcacccaagaaacttgcctttcttccctggggtctgaaatgagaaatacagaaatatctattttaagaagttctcatgtaagaatacctgaattcataatgaagagtgtttgcataccattaaaagcctaccacgtgccaaactctctgacatatattacaacagtcctgcaagatagatattattactcctgttttaaagatgatgaaacagaagctcataaagtttaacaggcttgcccaagatcttatagctagtacctggcagaaccagaacccagagcaaagagacacaacggtagagagtagaaagtgtgtggcacaaagtgtgtgggttcacagcccgactgaaccacccactcactctgggaccttgcgcaagttatttaacattctaagtttccttgaactggacttttgtgtgatgccattagcctgcagttagtgttgacaaaaggaaccgtccttagaatcaagatgaagtccattgtaagggtgttgaggacattgttgaacagttcatagttaaagatattgctgtttgctctgaatttggaggacagtaaactcctgagcgatcgtcagtcttagtgctcctaactattcaggcttccaggagcactggctcctggaaaactcatatctaagtttaaagttcacatataggaagaatttgggcggcatgtttcacctcattctgaattgcattttttgcctccaattctgcttttctttcttctttcattcccacttccattttattgtctcgaatcttttatattgctatacactcccttaaattcttttggatttaaccatcagtttcctcatctataaatgggggataacgttcttttaagggtgtgtgacaagcactcagcacagtgcatggtctgtaagagatgctcaataatggtgtctcctttcatactcttagaataaatctttgtcacctcattacaacaaaggacattatttgcattctaaaagattcttcaatttatgaaagggctcaccaaagggttcttttaacaataagccaatgtatttaaaataggacaccatttccacatttcttcaagggtattccttaccgagtctctgtcacataactggcacagcgctgatccaccaactctgcttcctcccactactccatatcaatgcagctcctctcatatgctatttgcaaagtccctgggatggaatggactaatttttaaaatgaaaacctttcctttatctttccagaggaatttttagatagaaatggtctgctgcagaaaatacagaatgggagatcaaattttctcttttacttcaccttaaaaatgtcctcccttaaattctttcatgttttccatgtacctaaagggggatgttgaatcccattacctctgccttctaaaacaagtttaattatttccaccatactaacatattttaaaatttatcagaaattaagttgtctgatgagtttagtattgctattaatgatttatcaaattatcattaaaaaaaattctagcccaggagcggtggctcatgcctctaatcctagcactttggaaggccgaggtaggaggatcacttgagacctggagttcaagaccagcctggggaacatagtgagaccctgtgtctataaaaaatttaaaggccaggtgcggtggctcacgcctgtaatcccagtactttgggaggcaaaggcgggtgggtcacaaggttaggagttcgagaccagcctgaccaacatggtgaaaccctgtctctactaaaaatacaaatattagccaggcatggtggtgtgcacctgtaatcccagctactcaggaggctgaggccggagaatcactcgaacccaggaggtggaggttgcagtgagctgagattatgccactgcactccagcctaggtgacagagtgagactccatctcaaaaaaaaaaaaaaaaaaaattaaaaattagctgggcatggtggtacatacctgtagttccaactacttgggaggctaagggggaaggatcccttgagcccgggaggtcaaggctgcagtgagggccatgatcatgtcattgcactccagcgtgggtgacagagtgagagcttgtctccaaacaaaaaaaaaactaaccatctcataaaatattaagcatttaattttgtcaggtttttatcccccagtctttagcactttcaaggtatccaattaaattaaaaaatagacaaagggaattcataatttgtatggaataggtcactgtccaggtcactgtctaataatcttcaaaaagacctgagctggcagagcccagtaatctacttatgtttgcttaaagcaatttgttggatccttaacacctgttgagttgagcgctgaaaagttaatttgcagtgcctatctgggctgtatttccccaggctttccttttccttctcgccctcccttcctttcttcctatccttcccttcccttttctcccttctaaaatttttattgagtgttttggcagtcaggatctgtactaagcactgggaatccattggtggccaaaataggccaggcccctaccctcatggtgctttctgtctagtgagggggccattaatctaatcacattcactaatgggtgtaggattacaaattgcagtaggcaccacttaggcctacagtacagtgagggatctggcctagtctggggttaggaagaggacagctttttggactgtgagaggaagaatgagtgggtaataaggcagcagaaacagcacgtgcaaaggccctgagttgctgggaattgtggtactctggagacaatgaaagatactgtggctggaccagacaaaacaaagacaggggatgggggatgcctctggtgagctcagcagagtcagagatacatgtcttataaagattttggccttcaacttaagaacaaagggaagccactaaagtaaggaagaacaagggatatgagaactgttaatgatcaagacgtcttaatttgtctctgcaggagcaatgcagtcttacacgtggtctctaacatacacagtgacgacggctgctgggtccccagctgagaactcccaacagctgccctgtatgaggaacactcatgtgccttcttcctccgtcacacacaggataccagtttatccccacagagaggaacatgggtaggtaactttccagggatgctgctggacttttaaaatttgatctaaagaggctgggcacagcagctcacaccctgtaatcccagcactttgggaggccaaggtgggccttgaagtcaggagttcgagaccagcctggccaacgtggtgaaaccctgtctgtactaaaaatacaaaaattagccaggcatagtggcttacaccgataatccctgctacttgggaggctgaggtgggagaattgcttgaacctgagaggcagaggttgcagtgagctgagatcgcaccgctgaactccagcctgggtgacagagcgagacgccgtcttaaaaaaaaaaaaaaaagaaaaagaaaaaagatctaaagaggggtttccttagcagctattttctcaaagaacaggaagggtgctaccctttgctgagttcccacaatatcctgagcactgtattgtgtaatccccacaacaaccagggtaggtaggtaggtaagaaggtgttagtgaccccattttagatgaggaaattgaaacttgtttggttatcttccattccccaaggtcacacagctggcacatggtagggcctaaactgagcaaatgtctgactccaaagcctgtgttcctccctctttactcctttaacgcctcagctgaaaacccctttcagcagttcccctgggtggctctttgtacacttcgcagaattacagagcttcatcttaggttcaagtcttttatgattccatttagagaagggcttccccacctgagggctggaggtccctttaggctgcagttattcatgaggttcaggggatttcccataggttctagcggtgttttatgccctggaaaaatgcatcatttgttttgcccatatttttttctttttcaaatacgtggagtgatgttgctgtgatgaatgaactacaaatccatacaaaagtgttacttgaatcctcatagctctttgccattatgcactgtctttatcaaaagacactaaccttacaatgtctaatgagcagtgatctgaaaagcacttatgatattaacaagagatcctgaccgggcacagtggctcacacctgtaatcccagcactttggaaggccgaggtgggtggatcacttgtggtcaggagttcgagaccagcctggctaacatgatgaaaccccatctccctactaaaaatacaaaaatgggctgggcgcagtggctcacacctgtaatcccagcactttgggaggccaaggcggggtggatcacgaggtcaggagatcgaaatcatcctggcgaacatggtgaaaccccgtctctactaaaaatacaaaaattagctagacgtagtggcacgcgcctgtagtcccagctactcgtgaggctgcggcaggagaattgcttgaacccaggaggtggaggctgcagtgagctgagattgtgccactgcactccagcctggcgacagagggagacttcatctcaaaaaaaaaaaaaaagaaaagaaaaattagctgggcatggtgggtgcctgtagccccagctactcaggagactgaggcaggagaattgcatgaacccaggaggcggaggttgcagtaagctgagatcgcgccactgcattccagcctggagaatagagcgatatactccaactcaaaaaaaaaaaaaaaaaaaagagagctcctaccatgtggtgcagtgggcctcaccactcacaggccaggttccaacagaccagttgtgggggacatgggaggaggagggggaggatttctcaggtcccttccacagttggcccagcataatgcagcacggcggtgacctgacagtgggcacaggcctggatgttggtgtacttttccataggttcaagtgcccctgagcagtcaatcgggcaaccattattttctcagggggcctttgagagtatttccacacatttagaatagactctgaaaactctgtttcagagagatttttgattcagcagaaatagcagaaaaaatactcacatggtcataggtcagcatctttaccataaatattttactaagaagaacagtgataataataggctatgtctacacaggactttctggtttatggagtgtgttcacacatacgatcctcagaatgaccgtgcgcagcatttttatggatgtgagaaacagggtcatgaaagtcacacagctagaaagtcgtggagcctgatttagaaccagggtctttgatgcctgtttgaacacgccatggtgctctccccccaggagacagcttacagaaacccactacatccttccccatgatgtggaagcagaggcctgagtgatacaaaaacataaatctcacagtggtttgttttttgttatccctatttgatttcaggatacaacaggggttttaaacacagcaggagtagaggtttccatcactaatgatgtttggctcagggctagatttcatccctgaacgctggctggggggtaagggaggtatcttctaggtgttgagggagaaggaaaatcaacctggggttttaagttaaccataacaaggccacaagagtggaaatggtaagaatcaaaaagaagaggccggacacggtagctcatgcctgtaatcccagcatttggggaggccaaggtgggtggatcacctgatgtcaggaatttgagaccagcctggccaacatggtgaaaccccatctctattaaaaatataaaaattagccgggcatggtggcacatgcctgtaatctcagctactcaggaggctgaggcaggagaatcatttgaacccaggaggcggaggttgcagtgagccaagatcatgccactgcactccagcctgggcaacagaatgagaccctgactcaaaaaaaaaaaaaaaacagatgaaagaaagaaaaatgggattgggggtgaaggggggaagaaaagaaaagagaaaaaagaagaaaaaggaaaaaaaatagatgaggtttttaaaaaggtgtcaaactgatctgttcttgctattactcacactattcaatgtgcttgatgcattttagatacacgggaagctataactatgggagctatggcaaccagcatcctcaccccatgcagagccagtatccggccctccctcatgacacagctatctctgggccactccactatgccccttaccacaggagctctgcacaggtgagtcagtggtcctggtttcttggccaggccttggtatacttggtgccaaatctggttaacacagttcataaactgttatgcatactgtgtgtgcagcgtgtgtgtccccaaggagaggacagtctttatttatttatttatttatttttattattatactttaagttttagggtacatgtgcacattgtgcaggttagttacatacgtatacatgtgccatgctggtgtgctgcacccactaactcctcatctagcattaggtatatctcccaatgctatccctcccccctccccctaccccacaacagtccccagagtgtgatgttccccttcctgtgtccatgtgatctcattgttcaattcccacctatgagtgagaacatgcagtgtttggttttttgttcttgcgataatttactgagaatgatgatttccaatttcatccatgtccctacaaaggacatgaactcatcattttttatggctgcatagtattccatggtgtatatgtgccacattttcttaatccagtctatcattgttggacatttgggttggttccaagtctttgctattgtgaataatgccgcaataaacatacgtgtgcatgtgtctttatagcagcatgatttatagtcctttgggtgtatacccagtaatgggatggctgggtcaaatggtatctctagttctagatccctgaggaatcgccacactgacttccacaatggttgaactagtttacagtcccaccaacagtgtaaaagtgttcctatttctccacatcctctccagcacctgttgtttcctgactttttaatgattgccattctaactggtgtgagatggtatctcattgtggttttgatttgcatttctctgatggccagtgatggtgagcattttttcatgtgttttttggctgcacaaatgtcttcttttgagaagtgtctgttcatgtccttagcccactttttgatggggttgttcgtttttttcttgtaaatttgtttgagttcattgtagattctggatattagccctttgtcagatgagaaggttgcgaaaattttctcccattttgtaggttgcctgttcactctgatggtagtttcttttgctgtgcagaagctctttagtttaattagatcccatttgtcaattttgtcttttgttgccattgcttttggtgttttagacatgaagtccttgcccatgcctatgtcctgaatggtaatgcctaggttttcttctagggtttttatggttttaggtctaacgtttaagtctttaatccatcttgaattgatttttgtataaggcgtaaggaagggatccagtttcagctttctacatatggctagccagttttcccagcaccatttattaaatagggaatcctttccccattgcttgtttttctcaggtttgtcaaagatcagatagttgtagatatgcggcgttatttctgagggctctgttctgttccattgatctatatctctgttttggtaccagtaccatgctgttttggttactgtaggacagtcttttcatcagtgtcatttctggcctccaatggctggcccacagtgggtgctcggccagtgttcatgctccatttgctctcacacacctggtcgctaaacagttttttttttcattctatcccctctttgacctcttcatgccaagatctaattggctgcatgtctgctgccctttttcgggcagctaccctcaccctgggccttgggtctcctttcccatcaccactctcctggtgcagaccctcatggagtcttgtcaggactggtctctcaacatcattttaactggccttggggtgtcccgtgtctgctcttttcatccagcccgcacaggtaatcttaagccgaagaatcctcctgaaatggatcccttttcaaatcactctcaggccctacatctccttgggctcctcactgtctaataagccaaatcagccctctgtggcctgtggggaatagacaggccattgcacttggctgcatttgggaaaccaccgctggacactctacctgtctaacacttccctgtgccttggctctgatccgactggtggccagttccactctgcatcctaagtatctctgtatgccctctgtgctcgtctcagctcaggcctttatcatatccagcttagatgaagacagaagccttcctggtggtctctatgcctctaaaatgtgccccatctctggtccaccccctacactgctgctagaggaggctttcggaaaaaaacccaactgaccgtgacactttccctgtctttggcacatcattgctttccaggacaagttcaattctttagtatgtctcttaagactggttacctttctggcctactcacaaactccctccctccccgcagccatgccagcccacatgtggttgtcttggatgtgccgagttcctccatgtctttgcagaaattgttccctctggctgggtgtctcttccccagtctcttcggctgggcattcatgatgggcattcatggcaatcatattgccgtctttgtggcattcctgaaagtaccaccttgagtcctccaggaccttattaggtgccactccctgggtttcctctctcagtagcatttctcacaccctgttatcatcaccaactttcctgtctgacgcgcacggagaccctaagctccctgaaggcaaagatgaagtccagtatcctcaggtcacagcacttggcacctatcagaaagaggagctaccttctcctgaacacgtgttgtatgccaggctctgcgctgagcactctccacatcccttagataacccctgcagaagaggaagtgagactcacagtaacctgcctgaggggttgaacccaggcgctgtgactcctgtccaagctctcaggcaccaccccctgccgcctctcagatgcaggcattcactaagtgtacactgagcagatgagtacatgggaggtggcgtcagcatgaacaatagtatggtgtgctgagcacgctcactctattctgcaggcacaggaagctacggagtggtaagatcagagctatgattaagaaagagagctctcagggcccccacaaaatgaaccaagggggactggtggaggcagggggctctgctccaaagcacttgcagaagtttaggaatgagatggcaggactgacgctagcatggaggctgtaattacatcagctgttagcacaaagacttgtctctgagggaggacaccaaggagaacgtatccacaacacatgggcattctgggcaaacaggtgtttgttttgatttccatctgcagtaccaaggggagccctggtttaatccccagacaagccaagaagttgattccaataaatcatcacctggggcattcattataggtctccaactgcgtcacacagagatgccagctccttaggagctccgtctcttgggagcactctgtgctcctcactgtgatccactgcatgactgagaacggctgcaacagcctagatcactccgcacactccaagcatctcattcattcattaatttatttctcaaatggctcctgggtaactatgtgcaagcactgcactagccactgggagtacagtgagaaggagacagagcatgcctgctttggtagagcttatgctccagtgggagacagcatcatcaagccatagttctgggcattgtcttccctccttcttcacttcctcattccccctcatgaaatggcaggagctggttttctggggtgatatttttaaagccattgccataaaaagaagccaaggtctcctcaaggcctatgaggtcctgctctggaagccacaacagtccccaactggaacactgccatttaatatctggtcttaatagaatggcccaaggacaagtgaaagcccatggaagggcccttttaatccagacaaggtgtgagagtccaaagggtcctaggccaggctcttcgccaccatgccttgtgactcttagacgagtgcctctgacactcccctcaatatacacacactccacacttcatggtttatgccttagtctccatctgtaaaatggggtgggaagaaattaattatatcagtctctacccaggttgatgagtgaggtcagtgttcaaaatatactctctgggggaaggtactgtctaaagacaaagtatcctttgttttgtttttcattaacatttattcagagcactgttctaggcatatttaaatatacagactcacttaattgccctaacaaccctgggaagaaagcatttttggagacaggatctcactctgtcacccaggctggagtgcagctgcgcaatcttggctcactgcaacctctacctcctgggctcaagtgatcctcccacctcagcctcccaagtacctgggactataggcacatgccaccaagcccagctgatttttgtgtttttgtagagacaaagtctcgccatgttgaccagacatgtctcgaactcctgggctccagtgatcctcctgccttggcctcccaaagtgctagggttacaggcgtgaaccaccacacctagacttttccctcagtttttaaagataagtagactgcctcagaaggtaatgtgccccaggtcatgcatccagtaagggacaaagcagactcaaatgcaaatcctccagctctcaaacccaatgctaaaccagtggtacttaatactactgtttcggagagtggaaggtgaattcaagaggttactgctgctattctcagtaagtttcaagttgccaaagagaagcacacaccccaagataaccttatttcttacgtttattggttctttggtttaaggttcagcatagagaaaatccactgcagggctaattagttttagctttccagagcaggggtcaagctgttccaattctgagtaactgaatatcacacttcactacatcagactcaccagggaaaaggacagtctgaattggaagacaaattccaagtatacaatatggttggagaaatgcaattggtcatcagcacaaaagtaactgaaactactgcaaataaatgccagctagatttgccttagagggctgatacatctatgaagtgcagtaattgtaggtttcccagcatttatatgctcaaaataattttaagtcatttgttttcaaaatagaatatgtgtatgcccttgtttacactacttatttgcacaatatatactttcttcctgggtactacaaaggtaaacctcccagccctgcttagattcttgtaacttttgacttagtgagtccagatgaatgaggtttcacagcgtgaggtttgaattattttggaaaaacattgcaactgtgctgcacttgttcacatcaaagtaagctgcctctttccaggttccccattcccaggcccaaccaaaaggagaaaataaaccagaccaagtacatagctacaaaatctttctgagcctcattcaatacatgttcatagaacctctaccctgtcaagcagccatagtggaactggggaccttgagctcaaaagccatttgatcacacttagactggaaagctgtcccttatttctcatctgaaaggcagaggcccagccttatcagctaatcaccccctctcacagaatcttcagcagcctggctcaaaccaacccaggaccattgggtgctacaaagtttgcttagggcactgtactttgggttggtgtcttgggccaaaaagaaaaaaaaaaaattaatcaatgatagtgttgtaagatctctgactgtagagccaggctccctgggttcaaatcccagctttgcctccaattagccctgtgcctcaattttctcatctgaaaaatgaggataattatggtatctattttacagggttgcagtgagggtcaagtgagttaataaaggtcggaacagggcctggctcatagttaacacattttattattatcctttgtaacaccatagttataatattatatttagggtaattttataattaagatctgtctccctcactgtactagctctgtgaaagccaggaccaagtcctttttctctccccattatattcccatggcctagcaccgaacttggccctcagtgagtgctcagtaaatacttgtcaatgaaatgaatgaatgactggattcttactctggtactaagttgctgtgtgactgcagtagatcatttcccttctcttgaccttaattatttcatctgtaaacccagaggtagaaccagatggtcagtcactaaggctcttcctatcattaatggaccatgaccctgtgattctaaaaagaacattaataacagctaacactttttgaaaacttactacataggagttctaagtgtttcacatgtaataacttaactaatcctgactctaaaggctcagcagcagagggatggtggctcacacttgtaatcccaacacttggggaggctggaagcccaggagttccagtgggatgaccgtttgagcccagaagtttgagatcagcctgggcaatgtagtgagacctcacctctacaaaaaatttaaaaattatctgggagtggtggcacatacctgtagtcccagctacttgagaggctcaggtgggaggatcacttaagcctgggaggcacaggttggagtgagctgaaatcaccccactgcactccagcctgggtgacagggcaagaccctgtctcaaaaaaaaaaaaaaaaaaagctcagcagatgtggactgtctgacaaagattttttgggagctacatccttctccagaagaagctaagaggctaggggtgagccctctggcagtactttggtgcagtgagagccgcctttcataggaaaacagtttgtgctcctgactgggccacctttcaccccttgttcaagtagcagctcatttggtaaggggtcaggaataaagggctctttcttccctctccatgtgtaggaaagtcagcccttggtgtggagagtcatttctcaaaatagatcttcctaatatggttccaaagagagcaagagtcagtcacagctgagatgggcttttgccataggcatctgatgaacgttggactgtgtgtgcaggcacacacatgtgcacacaggcacctctcatacactcctttcaagggatggtaaactggtgacttatgtcctttttaaaatcagtagcaacagcatatgatttgatccaaagaatggtaacttgctgttatgggccctcaacaaaaggtgccttattccagacagagatctctggaccctggaatttgtgcccagcatgcttaaggaccctgtatgaaaccggatgtaaagtgtgagaggtgaggcgggtgccacgggccagcctctgccactcccaccagactaaatagaagcttcattggtcatgttaatgaccaggccaaggcagtgagcacttcagctaactggtctttcaatggtctcttcactacagggaaaacgagtcactgactcatttgcaattagctgacctaacgggacagaattttccatgctggattctgtggtaacagaattttattgtcacattagagatattttcagccagtcttgtttccaggcaattactcttttcagtctatgacacaacttctgagcacagctgtgtcgagggtccttgactaggcaaaaaagccacactctctcgggttctgtggaaaagagcccaagtccattctgtgacattttacctacatgagccaaggcaagggggactctgtcagaaccagcaagctgaggccaggtgagaattctaaggccccagagctctgtcggggaagaggcagcttagtgaaggaagaggagcagagggattaaagtctaatgggctggcctccaaaaagggagtgctctcctgctcctgggtaacttggcagtggcaggtcagcctcctttgggacggtcatatcaatgtgaggaaagcgtgctccccaactgggtttctatgccagctcttccactagcttgctgtgtgactttgggcaggacacttgatctcatggggcctggctttctcatctgtacaacatggggttggatcacaggatccctaaaattctttctagtagtaacgtcccaatgttcatttgccaactattatttagcacctgctaggtgctaggcaccatgccagatgttgggaacatggtgttgaacacagcaaagccccatcaggagcatatgaatataagccaaaagaaagacctagctagctgccaggcaggatggtaaggccccggcccgagaggcacaggctggggtgtttaggttcttgagataagattccagaaaagtctctccgaggaggtgacatttaagctgagatctaaagaatgacaaaagggcaggcatggcaggagccaggggtaggggtggtagagaaggttctaggtacaaggaacacaggtaggacagagttccctgagatgggaaccagcttgacatgccatgggaccagaagggaggcctctgtgccagggagagcaccaggaggtgaggtgatacccaggagttgacttgagagaagaccaggtggggcaagcaacctttttgaaaaagtaaggattgttttgtagtaatagttcctaatgttatctgtttaatacacctgggatcttgttttttgggacagggcccaatcttactatggtctcactgggatttagagaggttcctgtgctagaatcccactgtgcaggcctgagggtccaccactgctgccacacaaacagcatcctgtaggttcccatgacgcagagcacaggggtatgcgccagtgtttctgatctgatttgggattaggaaagccttggcgtgctgtccatagtctccttggcaacagcccttggtgccttctcccttgagttcccagacaccacctacgcccttctccctctttcctaactgttcttttggttctgaagtggctgtacttttgctatgtaaggcatgccatcctatgtagggggaaaaatccctccctactcaaattgggatccctctttcttgacctctgaattgctggttctctttgcatgcttccggcctaagcgccttccccagctccccttaggctctcactcacagaggaagagcagttccctgtagccacctagactccagggagcagccattgttgtcataaccccttctccctgctgtctaggcttcagcctgtctgtctccctcacaggaggcagcctcccacctaatcccctgggcctccactttccaactgtcagggaagacagatggggagcagaagaattcatacattcacacagtctctctcctcctcgctgctctggccatccttgttgattggctcctgtccttgttggtgtagccctcagcacagcaaagaaatctttgtgctgactggcctgcagactgggagctttcaaaggaagcccatagctcctccccttcctcccctctgatcctactaacgggcttatttgcatagctgtcttggtaacagaaaagaatgtaaaagaagaagcacttcagaagcacttctcttactcctaatcctttctagaactacttcccctcttcttgtagctactaacacctgttcctctgacctgcacaaaagctcccctccccgcccctctcaactggtttctcttgactccttcctccacattcacaccaagcccaattcctattcatgtatcttccaggagttcagtgaatgtgagccaaaaagaaaaatgttctctaaatgataggcactaataataaccttcgaaattgttgacttgcttcctcttcaaaagcctgcttttaggctgaagtttataattgaattcaactgtaaaatgttatttttaataacatcattgtattttacttggcagtgttatgctcttgggttgacagactaggacctatcacatctccataactaatgataaaactcactaccatccatctgtacatccatatttatttatctggacatgcagttactagtgtatgtgtgtgtgtgacaaacacacactttcctgtattcctggtgtggctgtttctcattttgggtttgacttcccaagatattgtagattaggaacagaaagccagtataaccgcatgagtaaacaccagcccaactcaggctatgaaatcttttgcatttctcctgttgacttccctaagaccaatattcagtcttgtagaagttcagtgattcttctccatcaactctcattaatagcatcttaagaaatttaacttaaactataaacatgactgatattgtgtatatgcaacctcaagctaattttaactttgtggaatttctttcccctcaacaagtacccttttaatagccccacttcccggatggaaccttgtttgatgagcagtactcccagactgcatcctaccccagtcactccccgctggccagaggtgccctcagccaacacgtgctacacaagcccgtctgtgcattctgcgaggtacggaaactctagtgacatgtatacacctctgacaacgcgcaggaattctgaatatgagcacatgcaacactttcctggctttgcttacatcaacggagaggcctctacaggatgggctaaatgactgctatcataggcatccatatttaatattaataataataattaataataataataaacccaacacccatcccccagaagactttatctctatacattgtaactcatgggctattcctaagtgcccattttcctaatgaacatgaggatgggatcaatgtgggatgaataaactttagttcagaaacaggacttactaaaagtcagtgggactgggtttctgtagccaagccagacttgactgtttctgtagagcactatctcgggcaggccattctgtgccttttccctctgttccatgactttgctttgtgttggcaaccacttctagtaagctactgattttcctgttgacaaaatctctttagtcttgaaggatggatactggagacagaatctggtttgtgttcttggatgggcacataatttaccaagagcattcaccttgccatctgtcttgtcattgtactgtacaaggaacagccctcagacgtgttctgcacatcccttcttcctggtggtaccatccctatttcctggagcaccagggctaaatggggagctatctggaaactctagattttctgtcatacccacatctgtcacagtacctgcattgtcttggaatgtaagcactgtcttgagggaaggaagaggtctgttctgtattgccttaagttgattgaggtttgtaggagactggttcttctacatacaaggatttgtcttaagtttgcacaatggctagtgtcagcaaaaggcaggagagggtttttgttttttttttaagttctatgagaatgtggatttatggcattgagtatcacactcagctctgctgtgttaactttgtgaaactggatggaacaaactttaacttaccaagcaccaagtgtgaaagtgactttcacggttccttcataaaactataataatatccgacactttgatagaaaaaaattcaaagctgtgcctttgagcctatactatactgtgtatgtgtggaaataaaaatgtattgtacttttggagaattttttgtaggcatttttctgtcagatttgtagtaatttgtgaggtttgttagagattaatataggttttctttctgtattataaaatgcaccaagcaattatggtggacctattaccctatgggtaagaaataaatggaaatatgacatcggatgtttcagcaactgttctgtaaataaaatctttgatcacaccactcagtgtgataattgtgtctacagctaaaatggaaatagttttatctgtacagttgtgcaagatatgaatggtttcacactcaaataaaaaatattgaaacgacctgctttcttttgacttttcatttgacatgacctgtgtgtgtgtgtgtgtgtgggggggggggggcggtgtgtgtgtgtgtataaacattctgaatacttagggtgtaagtaggcagggcaaaaaactaagtagtcttatatggctgtgtttatccagttccccatcatcttgtcatataataataattaaaatgtgtataagccacacatcctggccttgaataatgattaagtaaaaatagtacctacagcctgatagaggtttgtaggggaccagttcttctacacacagagatgtgtcctaagtttgcacagtggttagtgtcactcaaaggcaggtacctttcagctcttatagggaatattattcttcaataccaacaccattaagaggtcccttggtacttagttcattatgctttaatgatcactaggtgtaaagatatttcaagtgcagtgctttaaatgctaataaacttctggaacagaacagtaacattactgaatacttaataagtattaacaaattcttctccagcactgtatttttattctgaggctgaaaggagtggggtatagaagtacaatgatggtgtttttctcaaacattaagagtctaggatctatgagaatttcagaaccacagatttccagaaatgggagtagtgagtatattaactaaaaggcatgagaacttgacaactcaatttgcattttgaaagatttatatttaaagccaggttcttacttgctattacataatatatttatacctgaacatgatttttaagattaaaattatatacagagcatccccttatatttagctatattgttctacaaaaagaaagcagatgttgaatttcactttctgatggtcaattagtttgatcttttgaccacaatccattagttggctttcatataaagaaagtaaggaaaaggaagaatgaaatttcagatttagtcactgcaaaaaataaacctgagagtgaccagaccagtctgtctcttacaattcaaagctagagctcccttaaataaatgaaagggtgtaggaagtctgacttttgacttactaagcacaaaaaagtaatcaccaaattctttagtcaggtaacaacagcataggacacccatttacacgtaacagccacaagttcattaactgaacaaatctttaggcaaaactagtcataatcaacaagggcctgaagcccagagaataggtcactccaggaactttgcaaggaagaaaatgtgtgcctccctttcttagcacaaccaagacctaggcatcattagcaccctggaaaagaaggcagcttcagatgaaggcaaaagaccactgggccttctctccagagcacaaggtgcctacctcttgggaaccgagcagtacctatgttcccaattgttttaaaactttcaacttcagaactgggaaagatctgaataggaaaaggcaacagctgctgtgagcacatgactcaaatgca

SEQ ID NO: 512 - DNA, 295458 bp, Homo sapiens
  source 1..295458: mol_type = genomic DNA
gcaaatgcgaagccaaagttatgaatattcaaatatgcaaaaacagaaaccgggaactgactgccatattttaactaaaatggaaacaattttaggattacaaaaatgattctgctttatacgaatgactcatcttctatcttattcattggggtttattttaaatatttccaaggattctccacacgcattccccgttgttttttctattgtccttttcttagcaggtaaaaggctccaagcttccttctaggagttttgtattttttgtattcattcccctcccccagttaacaaattctgtacaatgtatattttgccaaatccccttcttcttcttcttttttttttttttttaaaaaggccaatgggctgaaagcacagggaccctcaattttcgaacagtcccatctccccccgccccccggtaaggaataaactaccttaacgctaccaataacaaaaacacaacaaaaaacaaaaccactaaggaaagatgcaggttccccacaatcagaaatttctggagctaatgtgaccccaggaaatcagagttctaggaagaaaaactaaggcgctcggcaccagccttccccaccagccggggccgccttccccagcgccgcgagggcgcggccggcgggaccagttcccgaggcaggcaggcactcgggtgcaacctgaggaatctgggggcgtggaaggcgcgcgggggagggcaggcttccaagagtgggaccctcgcgtctcctgccgactgggtaggaaacgggggcttcccccttgccctctcagagcgggcgatcccaaagagacaggttaagccgcaggttgagagggcagctccgcgccggtgccccgcggatcctgcaggctcccgggtcccaggagaagggcgggctgggctgggctggggtggggagggcggtgaatgcaaggatattgccgcaggcaggagtccacctcgccctcgtcgggcccggcctggccgtcgcccccatcttcttcgtccacgaacttgttctcgtcatattcatccacgtccaccttccggaagcgggccgacgacactgtgttcttcgacatcccaatcccgaccagcggcaaaggcctcttcttggcgctgcctctacctcagcaagcccagcccagcaacccactacccggcgcctgattcacttccctcttccgctctgaggcgtcgccgactgccgcggctcggaccgttctgggcctgcgcgctagccccgtttcttcctcctcaggttcgcgctcccttggcgcctcccacgctgcccctgctcttccacggagagcgcgcgcgagggaaggagcgcgcaggacacagcgcgcaggcgcgggctctccgcaggcaaggggcggggctgggcgaaggaggcgggggcgagagggagggccaaaagctggaccgcgggcagaggtaagaagcgattggtcgtccgattgcgtcacgtgattctcggtgggggggttcccatagaaacgcttttctgcggtccagtctagggggtctcagattggcggggatgggcagcagcggcaggtggccttggcttttgctgcagccgtcaacgacctatcatcggggtcctgcgtaaggtccggctggctgggacttggctgtgggtgggatggactggctgccggaccgagtgccctgcagttggtaggagtatgaggcagagtgatgcacacccgggcgcccagcatcgttctaattgccggagacattgcctcagactgtgcgctgctagaggctgcgttcctgagcaggaagcccgtttcctgggattggaactacccttcttggccagcgggaagtccccaaggacggagtcgaaaggtcaaatcttatctgtcagtgctgtgtgacagcatcgcaacgggatctgcagaacctgaactcggtatcaaatctattgggagggaggggaacgtgtccgggcaggcgctggggtcgggtggcaaaactggggtgaatttgtagaatttgggaaagggtcattgacatcttaaaataggtggtcgtttggagcaagaatgctcgaaaggggtgagggtaggttaggctctctagtgctgggggaaaacaaaatgtggaaggattggtggaaaccagacctttaagatttatattatgatttgagatttatatgattccatctaggccagatttaaaaaaatatttgacatccccatttctggaatgtaggagataaaggcactaagacgaaggaaatggtagttgtgctgtgtgtattacactgaagaacaaatatttgcaggataaaattaatttggacatttggctggacactgctcggtatgggtccagtttagttggacctcgagcagaagactggctgttgccctgttgtgtaccacaatctttggtttccagtgctgtgttgaaaagagcactaggcttagaatcagaaaactcaggcttaagtgttgactcttccactcataatgtttgaacgagacatgtcacttaaaattctgtctcagattcctcatcactgaaatggagctaataatgtgcactttacaagattgttcttaggattatatatcacgaaagtgtttccaagctctaaaattctacataaatgtaaaatgcatgttgcttgtaccattggttttgggactagtcttataaatttcttaatgatatatggtgttttatctccttcctagaagagatggaaagattctgaagggcagaaacagtttttcttttgtatcttccttccatatgacaaaaagctaagcatgcagaagggactcgatacatgcttgatgaatgaatgaaatgtgaaagaccgtacagtttgagaatcatactgagaataataaatcagaagagggagagagatctcaaaattaaatatttgttggatatatacatgtaaatacatatgtccagtcttctttaagttcaaaaaaatacatatataatgtgtgtatatttatctatgcagtatattatatataaatagagagtgggagagagacctcgagaatggaatacatccctttttcttgggaagaagcaatgtggtgtttttctgttcccaattaaaccactcttctataagtatatcatttaggtgatagaagtaacattgtttaaattaacattcaagttatgaacacacactggtaaaaattctcttaggaatgccttaagacagcaaaggaaaaatttttacctgttggcaatatttattttaaaaagccatataccaaagtataaaatcattactatggtgaatggcgttatataacttagaataaagattttacaattttttttcagtttcagtctttgctaactttagtagatgctaatcagtatactttagctgttaaaggtgattgtactttttcttcttttaaatcaagatttttctttgaagagaaaatcgaacattagaggcactattgacagcaaatggaaacagggattcaagagctaatatatctcttctcttacatttctattcttttgtattgccttatttaggaaattttttattttcttatttgagaactatgaaagaatcccagagtagaaatcagcttaagggaatagtgaaagaaatttaaataatcgattgctcaagggtataattattttgattgctcagaattttgctctatatgtttaatgtgttaaatgtaattaactgccagccaaataatgcttattgcatttaagatgtgaaaaatgtccttttctaatgcagtattttttattgtctcacaatgatctaagtgcctagtacataataggtactcaacgtgtttctagtcaatgatttaatgatctgacaagttaattttggacgaacattcagaaattgagtattttttagtgggcacataaattacttctctaccttattaggtagttaaatctttataaagctttaagagaaatttttgtgtgtatgtggagaaatctgtctttaattatcttttaattagaaaactcattatttcacttccttgcaaattctaaatttttaatgttaatcatgatacttaattcatcttaggtaatattattttccttattttaatttttcaaatgagtgcttaccctgatataaaagatttataaggttttaagacattttacttgttgtgcaaataacctggtttggttcaatactgaagcaggaccgaatctgaattttctcaaggttaatgctgtatatgtagttccttattttctgtgatgatgcaaacagccaaggatcttttcagttagaagggactttagtaaggctataataggtctttcttttcagacattttaaaccaaggattctaacatgtgcttctcttctccaaacttgccactaaatacttaaacaacaaagacattgaatcctggctgggcgtggtggctcatgcctgtaatcccagcactttgggaagccaagacgggcagatcacttgaggtgaggagttcaagaccagcctagccaacatggggaaaccctgtctctactaaaaatacaaaaaattagctgggggtggtggtgcacacctgtagtcccagttacttgggagggtgaggtgggagaattgcttgaacctaggaggcggagatggcagtgagctgagatcgtgccattgcactccagcctggttgacagagcaagacacttcatctcaaaaaaaaaaaaaaaagaaaaaagacgttgaatcctgcaacgtgacattatttatttttattatttgaaatagaagtgcaaaatcaatgttaatcaaatatgtaaaatgtattataaatataaataagtgaatttcagttctggtaaggatgctttaataccagggttctctggcaacataattactgaaatataaaaagatgtttagcatgttgtccatagactatcttatgatttaatactcctatgaatatctacatcaactggttctgtgttaaactttaaaacatgaaccttcagaatttcattttttctttgtttcaagtttttcctttacataattttatgattacacattaaagtggaatagatagggtgaactctctactgaaacttatcaactaaaaacctgtaagccaaaaaaaaaaaaatcagggaaaaaaatctctaaatacgttgaatttatttgggaattagaaaagaggattataacctgagatgcacagctgtggcaagctacatatacatcaaagaagggaggataaagggaaatgtttttctttttttctttttttttttgagacagagtctcactctgtcgccaggctagagtgcagtggcacaatctcagctcactgcaacctccgactccctggttcaagcattctcctgcgtcagcctccgaagtagctgggattacaggcgcacaccaccatgcccagctaatttttatatttttagtagagacggggtttcaccatgttggccaggatggtcttgatctcctgaccttgtctgcccgccttgggctcccgaagtgctgggattacaggtgtgagccactgtgcctggccaaagggaaacttttatttggcaaaaggagaagttcacataaactgcttggaaacagacattggttttggatactcaaagtcagagttggcaccattttagaggaagagatgctgttactgggcaggtattgttttgagagcattttatctgaattgctgcagtcctacagaatttcttattttagaaagtccttgagacaggacttccaaaaatgtcttttatctcgtccatgcaatcatgaaccctactcctttgtgctctcctggctctagtttgtgtttgacaaacagtgatttcatcctggtatctgcaactttcataaacctttatttatatattagtacttcaaagattaaaaaaaattgtaaatctcttgcctcaagaaaaagatttagtgccaaagaataagtcttatttttaaaatattgtgaatgagacttgtttcatttgatttttttaatggcttatgatgatataaaatgaaagctatggactttaaaacatatttatcctgtattctttcttagcactggtgtcttttattaatgctaacagtcgttttaaggttgcatctcttatcacactgtataatatttgaggtaatgataatttacatcttcttttctaatatttctgtcacctattttatcttgtgtttgctagaattgtgaaaagagtgttgaaaaattgagtgctgggctcttctgctttgttcctatttcaatttcgttggtatttcaccagttgacattatattgactttcgctttatgacttttagaaatgactgctaaaattatcaaatgccttttatggggatctaatgataaaaatcatatagtttctatctttgaatttatgagtgtagtgaatatatatatttttctacactgaaacattcccacatttctagaataaactctatttggttgtgaaatattaccattttaattacttgctggatttgattagtttatattttgtttatatggtttcagaattttttttaaataattgccacaagatctcactctgttgcctaggctggagggcagtggtatgatcttggcttactgcagcctcgacctcccaggctcaagccatcctcccacctcagcctaccaagtagctgagaccacaggagtacgccactacccctagctaatttttgtattttttgtagagatggggttttgctctattgcccaggctggtcttgaactcctgagcacaagcaatctgccagcctcggcctctcacagtgctaggattataggtgtgaggcactgtgtgctgcctttacaaactttgttttgtagatacagtgtctccctatgttgcccaggctggtcttcaactcctggcctcaagcgattctccctccttggtctcccacatgatgagattacaggcatgagccccccccaccatacctggccataatttcagtttttaagtaagattggtccatagttttatttatttgtgctatctttatccagttttgatattagtgttagtctaactttgtaaatgaatttagatttccacctttttttctatgctctgcaatagtttaaatgatgaaaaattatcatgctatttggtttttgaaagttagagtgtgctgcaaaaccacctgggcttgctgatacttttagaggtagatctttgattattcttttcttctatgattattgatttgtttgattgtctttctcttcttgaatcaattttagaatttatggtttttagaaaatcatgcatctcatctacattgccaatttattggcaagaagttgcacaaaatattttcttataattattttagtatcttccatgaccatggacgtttttcttttctcattaccactattaactctttaagcaaaacattgaaatcaactttttcttccccaacctgattatcacaaattctagtagcatatcttaacttcttaaagaaaataagaagtcaactatctaagactcataggtttgataaaatttgaaagatcctgcaatccttataatttcctactgtttgtccttatcctgttcatattttattagtaatagcaaccacttaatacgtttattgtgtgtcagacacttggtaaataaaccctttacttgcattatttaattcccagagtagctctatagcctagaaattagtgttcccattttatgaatgagtaaactaaagctcagagaggttatataatttggccaatgatattcaatcagcaagtggcagaatgatgtgggaaccgagtatgtcagattctggggtttgtgcatttaatcaccactctctactttcggtatctttttcattattccaaattataatacttacttttttctaaaaattagtatataaccaagtatcaaaggcctaaataaacccatataacagcttgaaatgcgctgtaaattatgaacctaaaaaaaccttgttattgtaatgattttttaaaggatatttgttttttagatatttctgtgaactttccttaccttatctctgtattttgagactagacatagagcctgatttctaatatttagtctaacagaaaagatgtcactttttttgtatttagagagaccagtaggtgtcaactagtaattcaatttttaaaaaagattatgataaaatagacataataaagtcactatcttaaccattttgaagtgtacaattaagtagtactaagcacattgttgtacaactattaccaacatccatctccagacctcttttcatcttacaaaattaactctgtacccattaaacaataactccctgttccctgctccccagcccctggcaaccaccattttctacttaccacatgtaagtggaatcatgtggtgtttgcctatttttgactggtttatttaacttggcataatgtcctcagggttcatccatgctgtggcaggtgaatggatttccttcctttttaaagccgaataatattccattgtatgtatataccacattgtgggtatccattcatctgtcaatggacatttggtttggttctaccttttggctattgtgaataatactgctataaacatgggtgtagaactatctctttgaggtcctgtttttttatttatttatttatttatttatttatttatttatttatttattttgagacggggtctcactctgttgccagactggagtgcagtggtgcaatctcggctcactgcaacctctgcttcctgggttcaagtgattctcctgcctcagcctcccaagtagctgggactacaggtgcatgccaccatgcctggctaactttttgtatttttagtagagaaggggtttcaccatgttagccaggatggtcttgatctcctgacctcgtgatccgcctacctcggcctcccaaagtgctgggattacaggcgtgagccaccgcgcccggcccgaggtcctgttttataaaaaaaattactttacttttttaaatagattcagggtcttgttatgttgcccaggctggtctttaactcctgggctaaaacgatactcccacctcagcctcccaaagtgctaggattacaggcatgaaccaccgtgcttggccaagatcttgattttatacccagaagtggaattgcctgatgatatattaattctctttaattttttgaggaacgatttgcacttaattttaactaaacaatgcaataaaacaatgttctattgccttgggtcccagatttagtacatccctgaaagtcagggacacctaagataagataatcttgggatttatgtttggcatgaggtcctgggcgacaggggagtgggggagggccaaagttctgggatctagaacctactaaagttttccaccctagcccaccctgcctacctggcttccatagtttagaggatgcccattggtactgtggtttgagcagaatgacagaaaagctacaggacaggtcctaaataaatatggattctttcagactttgtagtgaatctgcattgttattatttagagaagcattaaggcataatgattaagaacatggattctggagcttgacttcttgggtttaacgctcagctcagcctttttttactacttgggcagttacttaaattatctgtgccacaatttccttatatgtaaagtagttattataataatatctacctcataggattattgggaggattaaatgaattaatacatgtaagtgcttagaaaaatacttgacatatagctctcactcaatgttagtaataatgataatattattttttagaaacagggtcttgctatgttgcccaggctggagtgtagtggtgtgatcatggctcgctgcagcctctacttcctgggctgaagcagtcctcctgcctcagcctaccaaagtactgagattacaggcagtagccaccacgcctggccgaataatattattttaaattagcataggttatgatgtggctttccttttaaaatttattttattttatttttttaatttttaaatttatttatgtggctttccttaaaaaccaatacgaagagtaagattccattctgtgagttaaactttttggattgcttatactatgaataaaaaagatgtaacggcagtttaaagaaataggatttgctgtccgatcagcaggattagattatagcttgatgaattctaatctatttagtattatataaattggattgtagcttgatgaaacatagaaaacggatttctagtcacatagaaaatcgatgctatgacaggagctggtcatagaggtttgtgttgtctcttgttgcctagaccctcccaaacattgtccaggaatgagatgcctttgtgcataccccatccaccacttcattctaagcagatgtcagtcaccactactaaagcagaatctgatagcactaaacatttgagtcacataatggactcctctaatccataaggcaaccttatgataatttggcttgctatgtagcttatctacatggagaggctatgtaacctggatgacttgaatatatgcttgcatatccagttataagtcttactagaaatcagtacattagttttttgtctttacatgtcaatctcaagaggtttgttaatccaaacctgcttctgatgagtaaatccattctccctgtacttactaagtaggtagttgagcatataaagctaagacccccaaaccctggaccttggtagattcaccaagataatgtgtccgtctcttcagtctcattgttttcttgggatatatcccagtgccttttccagatcatcatattactagctaccttaatttacttctattttctttatttccattagttctatatgtgtggtggcagagatattcttccatatcaccattgccagttggctgaagaggggtggagcaacccaatttctctctctcaatccccggccagcctgatatgaccaagaatcactgcgtagtgagcaaggaaagctaatcactgcactgcaggatctcactttgtggaactattgctttgctatatgccttcttatagcagacggagctgaaaggaaccttaaagatgaactagcccacatttcttgttttacagatgaggaaacagattacttgccttggacagtatatctttatgctcttctaacagtcttttgtctaaggttggcctggacttacgacctgtgagtaatcttctttgtagccctagtcttatcgaaccagtacaaaagtttaactgccaaaggcactttctttcctatagttctgacaacttctccttttgttatataccactgatatccaggttcagttcatcatctatttcagaccatgtttctaattggattctctgtagcctggttcatgttgtagtctgccattttctggcaacaaattggatctattttaataatgatcagagatgctggatttgtcatgttgggatctttttaactcagtatcccaaattgtggacataggatttcatgaaataaaaataaacctcaacagtacttctttaaataatactcactatatacccagaataaaactatattccagtaattccattaaaatttgtatgctaacaataaaactttgttttaaaatttttattcatgtttattttaaccacaatactaattgctattcctaaaatatgtttttctttctcctcctcccttatggagtattaaatgttttaatgtcatggcaaactcttttattagcttaggattactttatatatatatataaagaaaaaaattaatagcaagttacgagaaaatgtacatttttcttgtaatgtatctttacatatttcaaagaggcaagtggcagcaaatgtgaaataagcataagcaaagtgctttcatttaagtgcttagaggattaatcaaggagcacttcctagaagtgtgttttgaagattttaagagaaggtacaaatattcactggtgacgaggatggagtcagaaagagggaagtaaaacacacattatgcattgggagctgcattagaaaggggaatggatgctaacaaaaagaaaaaacatctcttgcaggatggtgaagcaggctttcagctgggatggagaagggatgctgagttacaatcattggtgaagttattgagatgtcatttcagccttgctactcacattttgctgggtaatgtgctagatcctaagggaaaagctaaagagaagggagagacagtgcttgacctgtaggtacttatgatcttgctgatgagacaaggcaacaggaagttaaaggaggatccttgaaagccagtaagaggaacttggattttatacagtatgtgatgacaggagccattggaggttctcatgtatcatcttacctctatcatctgctcagaagggagaggtctgagctggggaagatcaaactgagcaggtggctaggttttaatctttatagctatatgtaatcagcagaagagctttttcccacacaaaactattttgaatcactttagaaaaaaatgagctgcctaaaatcttctgtccatgattaacaattaatagaaaatcactggtttgctcctgcaaacagcacttaatgtcagtagcttcaggctgtttttcaattttacagtaaattttttaccgaaacaaatttaggtagctattttgtccatgggcttttgtagtggaaagatgatgtgagtaaaatagaataatgagattccttttctgcatcaaaatattagcaagctgctaatggttccattttgatactgccactttcaaaataaaggagagagatcaagttgcttatggaaacattttggattatgtttaaaatagtgtaactttataatagttgatatggtaaataattcaaggtttgcttttagtgcatcagtttatctccatcttggctcagccctgagagagaaagtttccagatttttattgcctatctaataagtcccttggtaattggtttcatgctgtaggaatgtagattttatttcttccctttcttcttcttcttttcatctgcctccttgctacttgcaaactgttctgtgatttccactatctccactgaccttccagtgggaagccttccaaggtccttggtttcctggaatgacatttgaggcatatttaagtgccttacgatattcctgggtttatttgggttttggcccatatgcattggtggtaagtccctgagaggcactagcacaaaaacaacaggagccctgaggtctggaggtaggttgggttggagttgtccactcggcatttgaaaaaactgtccaggaaaggcattgtttaaggggtagctctctaaagcctcctgagcttttgtgtttggattcctttttgtctggagaagaacatcagtgaagtaaggttttacgcctgttatggcattgatttcatatgcgttgtgcctgtcagccagtgctctcccagttaaaatgggctgaaaaacatgtgatcctgagacaccacttataaagctgtggagaacagaatgccagatcccaccacttattggactcaaaacaacccgcggccataagctggccaggctccggagagcttcgcggttccatgctgaggcaggaaagtccatctcagtatgatagagctgagaaaaataaatactaagagtgatgcctggatacgtaatcaggaaattatacattttgctgatgcagcagtggttagcttcattacaaggggagttgttggaatacagaatgatatgcctgatgctgtcattattgtatatggctgagtcaagataaccattcatttcaaagagcattgattctggatggatataattcccagtgcaactgctagcatggcccttttgcaccaggctaccagaagaagtttttagttcataaaatgtgaggtgttttgtttgaggaaatgttgtcccataagggaatccaaaaatctgacaaaattctgtgagggaaactcttgcttcttcacctgttcgaatatggtaaggacaattagagcaatcgagagagaagcttagccagtaatatggttttactattgttccatgatttgctaggtactcctcatatatgggctccattgctagatttactgtcttctagctgcaaacctaaacaaggaagagaaattacatataaaaccagcgcaggaaaaactgaagacagtgcattaatttattaaaccatactttctttaaaggaagtagcacaataaagatagtgatatatgcatagatttaaaagctcaggattcattattctttattgagactcctagagcatggggaggaaacagaagagaaaggcgttcttcaactttacctgtttcatagattccaagtcagtaaagcaaatgagttaacaatgcaagttctagaaacagactgtctggttttaaatttgggcttggccaattatcagcttggtggcctttgacaagttatttaacatttgggagccacagattccttgtctgtaaaatgaagatattaatagtacttacctgataagattgtcttgagcattgaataacagaatgaatataaaatgcttcactaatgtgcttgtcacatagtaaggactcagtaaatattaactcttagtagtaaaagtacaaatcctagggttatctagattattcctaattataaaagtacaaaaaagtgttttgcattttgttcatgatctttcttctcagaatatgttaacatctaatgtattgtgcagaactattcagtgtgcttgcatttaacatcaactttcttaaaatcactggaaataatttggaggtttttgggttttttttgagactaggatcatgggatctcttttgcttaatgatagagacttcttaggaaagtgccacttgagtattctttggattgtggacactcattcattgacatgtaagagttttctttcccgtgagtgggtcttgttagaagacttttgaaaaattactgttacagaaagcaaatatggttctttagaatatttcaaattagtagtttctgggatgttaaactcaaaaagctgagatctttaagtaatgattttttcctttaaaaaatattccttcagttatcgttgttcctataatgctctaggagctacctattttgtttgtttttgagacagtcttgctctgttgctcagattgcagtgcagtgagatgatcatggctcactgtggccccaaccttccgggctcaagtgatcctcctgcctcagcctcccaaatagctgagaccacaggtatgtaccaccatgcccagataatttttttattttttaggagggatacagtctccctatgttgcccacactgatctcgaactcctgggctcaagtgatcctcctaccttggcctcccaaagtgctgggattacaggtgtgaaccaccatgtccagccttccgtcactattaacatgtctattccctccagtctttttgctatatgtgtatgttacatataatataaacaaagtcatgttttataccctgctttttcacttaatattgtgccatgagcattttcccatgttattaaaaataatattcggccaggcgtggtggctcacgcctataatcccagcactttgggaggccagggtgggcggatcatgaggtcaggagatggagacaatcctggctaacatggtgaaaccccgtctctactaaaaatgtaaaaaattagccaggtgtggtggcatgcgcctgtagtcccagttactcgggaggctgaggcaggagaatagcgtgaacccaggaggcagagcttgcagtgagccaacatcccaccactgcactccagcctgggtgacagagcgagactctgtctcaaaacgaaaaacaaaaaacacaatattcatggctaattagttttttattatgtaactgtaacattcagtttcttgcctcttttaattattataacactttgataaatatttctgtgagaaattatctattgcatatattatataatatttattataaagaatcagatttttttttttttttagaatagattactagaaatcatagtattaggtcaaacattgtcaaatcgcttcctaggaaggtgtaccaatcttatcacattctcttacaatgttgtttatcccaatttgagaagggagcattggtatttttttgttgctataatgtgtgcctttattatttctagtgaagttgaacactttttgacatgcttattggtctgtggtatttattcttctgtgaaatatatttgattttttacctattttttgcgtgaagttttccttattggtttgcaagacatttttatgcatcaagaatattaaatctgccacatttgctgctaatattttacctggtttatacagccttttaattatgccaatgttattttaattgcaccaaattttacatttttatgtggtccagtctctactcctgtgattttttttcttattgtatttagaaatgccttcctcatcaaagcataattaagtattccccatattttcttctagtatttatggtttcattttttacatttaactttgtcagataacaaaactgataaggcagaaaatttaaatgaggtaaactgaccattgcaacagaatatatttttcacttttcaaaatctcacttatcatatcacaagtatgaatacttgtgctaataaataaattatggcctctcatatggaagtgctatgttcaccttctgtcttcctcagcccacatcagctcattcattgctgtatttgatacagcttgatctctagcctgaaacctgcagagttcctatgctaatcctatcctgggcagaaaatatgttaaaagcctcaatccagctgtaggtggaatgtagctttattcatgtcaccattatcttagtggctaatatcctgcagtaactctggcaccacatacccaccagattctagatttctcctagcctctgctgtgtcatcttaatccataggattggacattagctttgttttttccttagtactatattttcctgatgtaactgaattcctgccttgaggcttcctagaccttgtcatagctttccttctagagagctggatttaacccttggcagtggacgatctcttggaacctgacgccatttcctgcttactcccgagcattgtttcctctctggacctcctccttgcttagccttcatcaggctggatggatctctccatcagaacttgccaaaaccaagcccaaactttcatgctttttaatattgtgcccttgatgtggtcgacttatgggtggtacaccggacatccaggttactgctcagattacaatttcaactcacccatagacaatttacagattgatttggctaaatgttatggaaacagaaccaaaaggcacttttctgtctttattactatttcttaaggtgatgtgtatgtggagttaactatatataatggtcccataattacccttttgggaaacaaaagtctttgtgtgtttttagataaaggtagcaaaatggaaactccctattgcttttctaagcacgccttcctttgcacccccatcttctgtggctgttttagccagaaatgatacatcattactgtctttaaggagatggagaggactgtggctttaacacatagtggagggagctctgtagtctcattcttgctgacaacttttcagtgtcaaccaactatagtttcctattggtgaagttttcactttttcagagtctttctgggcttgttctttgatcaccctcatctgaagaggaagcaggaaagaactgttgccctctttgaactcttagagaattcatggtttattgtatcaatttgttatcgaccacagattatcttgttaacttttggtatctgtcattttattctccccaaccaggtggaaatgtaccctgtttaggcccaggacctaccttagcaaccttgattggctcacaagccaggttgcttaagacttgtttccccagcagctggtgtccctacttcctgcctagcccttttccttttgctttgtctgtgcttgggaaatacatgttatactctgtagagcagatttgctggcagtaagaacagagatgtgtagagcccagcgtgctggagggctctctgcatctggctgtgagtggcccctggactgggaccgtgggaggacagctttccatagtttaacataaatgaaccacaccataaggacaatctgctctcatttcactcaactaggatttagtgagtactgttaaagcacagtttgcactggagtaattggagaatggagtttgcccttcacaatctgtgcacaatctgttagcagctaaaaacaaatgttagcagttataattaccatcaatttgtctccaggcttggatcacattccaggtgttagaagagatggtccatttccttttttttctcctttaagtcccatgccctgtttcaagtagcttcagaaggcaattgtgctgtaaagattcaccttgtaatgggttcaggactctttcacagtttgtgtctattcgttcatttgaactttgctgttccaagttagaaagcccttgctgaggtgtggctacctctaagaacactgttgattgggtgccatggtaacgtttgcaaagtagctactgctaggatacagctctgacacttattactttatttgcatatcaagccacctgttccaaagatgaaaatatacaggactgcatatcccagtctgggtaaaaggataatagctgactgttgaagagaacatgttgcagtttttctcctgctagctgaagaatcaagttctgagggcctgctcctcagcacctttctcctggtctagagtaggtgccaggcctggcggttctgttgcctgcgtgggtgccagggcttctccttgggaggcttgccctctgtgagagggagcagagagttgacttcctccaagaggcccatagtccctgaagggggtgtttttgattctgtctaaacctaggctatgtgttagcggtttccctcctcttagaaattgcctggaagactcttgctattggtatgtatgtggttccctccagtttaagacaagatttgttccaggatcggttgtagccccttctctgtggctaacggaagagccacttgtccttctccattcttttccttagtctcccttgacccccacatcatctcctagacacaaggcacattgatagtcacaattcactgtcaatcactctggattattccctcattcccctttcccaggccacctgaaggagtgagtggggattgctattgtgtacattccagtaataactattggctgtaagcagacatactctaaaaataactcagggatactgagcacccagagggcaccttctgtcttctcgaagcttcgccacgcctgtttccactgtcagacttccagtctgcaccacagcacacatcctttctcatccagagtgctcctactagacgagatgtttttgtctcctaagggcctcaggtgtattcatgaactcctcagctggttattttcagtttcatcttccttggtgcttgctctggcacatggtcactgctgcatcctgtcccttccccacagtttgccatgggtcatcccttttttctcattgcttgcatcttctaactgaatgaacttgtaaatatggaactgaaagtcaatcctcatagctcatcttttatttaatcctaataaatgacaatctattgcaaacattactttaaaaatattacttatcaaaagctgggtgaaaggataatagctgactgttgaagagaacatgttggggtttttctcccgctagctgaagaatcaagttctgagggcctgctcagttctgtaagaaagtattagctgtctgacaggttccagtgaggggaggaaaagacaaaaaatatagtccccaaatctgcaccagcatcccatgtgcactgtgcaccttccatggtggattagatgctcagcaaatgatatacctatggaaggttaagcctaaagaaacaggaaaaatgagcctttgtccactagcacatttatcaattgcattttagggtgattttagggataggcaaccccaattagtcattattctttaaaggtagttgtctgttagatgtaggaagactccaaggaatgttaagttggcaacattccatttaggttgcacagaatgacttttaagactaaacttcatcaggaggaaatgaaaggcctttaccatggttcctgttcacagtgaaattgacatgtattggaaaggagatgcttggaagaaatgtctagcttccccaacagactcctttcttctcttttctgtcttcctttgttaatctgccatgtttcatcttcattcagatgagttatgatgtatattatttatgtagagatattatgagattataatgaagaagatttacaaagactaaactatcctgcaatgatctaaatttttaagagacatttactcagtttggcactccaaaaattattaatctatgttctgacaacccagtttggggtatatccaagatggcttgtgtgttgctagttactgcttataaggcaactttctctttgggtggcaggaagtaaaatatttataagttattgctaaaatgttaaagttttatttgaacctactgtacccaagtaattatataattcatcactttagtagcagtttggttgacactgaacaacaatgctcaaattcatgtagcagtaacaaactacgtgataaaaggaactgaatttagaaagcaagcttcaagtaaagatcagaagattaagtagatttcatggagctcactaaggagttagatgggaaagatgagataagaaaagcactggagttgagaccaaaaggagacgaaaaagcagagggtggatcttcgagctcggggggttataaacaagatggccacaaggtggcagcacagtcttaacagcagagagctttctgtagggccacccttaatttgctaacaccacagactttctcttagaattcctccatgttgattttcctcattatcctaggggaaacagcagcaaatgtttagaattaaaaatgactcctaaaacttaagctgaggaaaagtatagggtaaaggcagcatctttacttccagagactgtttagatgctctaaagaaggcttccaactctctgtgggaaaggaccaattgacatttccaaaccatatgttaaacagtgatgggaggccattgttttgggctaagcttgtacactaggccccagccgaccagaccaaaccaaaatggagtcactcatgctaaatgtgacataaactaaaattttaaggaaacagatagatcccaaagcagaccaagttttttttcttttcttttcttttttttttctcatgaaaacaggagattccggcacaaggaagtccccttggctctctaactcttacaaaaaagtaacctgaaatccatgttcccaccttaaaaaccaactgttctgctctttccccgtgggatctgagaccaaataagtacatttatgatggtaacagagtgacctcaatgcctaaagttttggtcagtgtcaaaattgagaggttgaccaaaaggtggggaattgttaaattaagtttagcctaaagctgcctccttacatattttaagttcagcctaaaggtttcttcgtactcagcgaattgtaacctaactggaatgtaaatagactgtaacctactcttgtaccaatcaccaagttttggccaaaggcagccaactgttcaaactgtgttcaaatcagggaaatgccaagctgtaacaaatccagctgtttctgtacctcacttccattttccttatgttgctttccttttttgtccacaaatcctctgtgaccatgcagcagcactggagatgctttgaacctattctggtttggggagctgcccaatttgccagtcgttccttgctcagttaaactctgttaaatttaatttgtctaatgttttaacacatcatacactaatacttttgtaaaagttaataaaaatgatattatacaaagaagaacaaaaaagacatacagaacataaacctattttttggtaattagttaaactaattgtgaaaatagcacatcaaactttctttttaaggtttttgaaaaccagaaaatctaattattatgctctagccaaactacccaatgtttgctttacattctttccccacaaaatgaaattagtgaacttaggcagactcaactaagttcacaaaatcgactcaaaaaaaaaaaaaaaaagattgctttgcttattggggtcttttgtagttccatatgaattttagaattttttttatttctgtgaaaaatgtccttggaattttgataagggattctgttaaatctgtatagcactttaggtcatatggacattttaacaatattaattcttccagtccatgaatatgagacatcttgagacatctttccatttctttgtcttgttcagtttttctaatcaatgttttacagttttcagtgtataaatctttcttttttaaaaaattttattattatactttaagttttagggtacatgtgcacaacgtgcaggtttgttacatatgtatacatgtgccatgttggtgtgctgcacccattaacttgtcatttagcattaggtatatctcctaatgctatccctccccgctccctccaccccacaacagtccccagtgtgtgatgttccccttcctgtgtccatgtgttctcattgttcaattcccacctatgagtgagaacatgcagtgtttggttttttgtccttgcgatagtttgctgagaatgatggtttccagtttcatccatgtccctacaaaggacatgaactcatcattttttatggctgcatagtattccatggtgtatatgtgccacattttcttaatccagtctatcgttgttggacatttgggttggttccaagtctttgctattgtgaatagtgccgcaataaacatacgtgtgcatgtgtctttatagcagcatgatttatagtcctttgggtatatacccagtaatgggatggctgggtcaaatggtatttctagttctagatccctgaggaatcgccacactgacttccacaatcgttgaactagttcacagtcccaccaacagtgtaaaagtgtttcaatttctccacatcctctccagcacctgttgtttcctgactttttaatgattgccattctaactggtgtgagattagatctttcaactcattgcttacatttattcctaagtattttattctttttataaacgggaatttttcgggggtggagccgagatggccgaataggaacagctccagtctacagctcccagcgtgagcgacgcagaagatggctgatttctgcatttccatctgaggtactgggttcatctcactagggagtgccagacagtgggcgcaggacagtgggtgcagtgcaccatgcgccagccgaagcagggcgaggcattgcctcactcgggaagcgcaaggggtcagggagttccctttcctagtcaaagaaagggctgacagagggcacctggaaaatcaggtcactcccaccccaatacagcacttttccaacaggcttaaaaaacggcgcaccaggagattatgtcccgcacctggctcggagggtcctacgcccacggagtctcgctgattgctagcacagcagtctgagatcaaaccgcaaggtggcagcgaggctgggggaggggtgcccgccattgcccaggcttgcttaggtaaacaaagcagcctggaagctggaactgggtggagcccaccacagctcaaggaggcctgcctgcctctgtaggctccacctctgggggcagggcacagacaaacaaaaagacagcagtaacctctgcagacttaagtgtccctgtctgacagctttgaagagagcagtggttctcccagcacacagctggagatctgagaacgggcagactgcctcctcaagtgggtccctgacccctgacccccgagtagcctaactgggaggcaccccccagtaggggcagactgacacctcacagggccgggtactcctctgagacaaaacttccagaggaacaatcagcagcattcacggttcacgaaaatctgctgttctgcagccaccgctgctggtacccaggcaaacagggtctggagtggacctctagcaaactccaacagacctgcagctgagggtcctgtctgttagaaggaaaactaacaaacagaaaggacatccacaccaaaaacccatctgtacatcaccatcatcaaagaccaaaagtagataaaaccacaaagatggggaaaaaacagagcagaaaaactggaaactctaaaaagcagagcgcctctcctcctccaaaggaatacagctcctcaccggcaatggaacaaagctggacggagaatgactttgacgaattgagagaagaaggcttcagacgatcaaactactccgagctacaggaggaaattcaaaccaaaggcaaagaagttgaaaactttgaaaaaaatttagactaatgtataactagaataaccaatacagagaagtgcttaaaggagctgatggagctgaaagccaaggctcgagaactatgggaagaatgcagaagcctcaggagccgatgtgatcaactgaaagaaagggtatcagtgatggaagatgagatgaatgaaatgaagcgagaagggaagtttagagaaaaaagaataaaaagaaacgaacaaagcctccaagaaatatgggactatgtgaaaagaccaaatctacgtctgattggtgtacctgaaagtgacggggagaatggaaccaagttggaaaacactctgcagggtattatccaggagaacttccccaatctagcaaggcaggccaacattcagattcaggaaatacagagaacaccacaaagatactcctcgagaagagcaactccaagacacataattgtcagattcaccaaagttgaaatgaaggaaaaaatgttaagggcagccagagagaaaggtcgggttacccacaaagggaagcccatcagactaacagtggatctctcggcagaaactctagaagccggaagagagtgggggccaatattcaacattcttaaagaaaagaattttcaacccagaacttcatatccagccaaactaagcttcataagtgaaggagaaataaaatactttacagacaagcaaatgctgagagattttgtcaccaccaggcctgccctaaaagagctcctgaaggaagcactaaacatggaaaggaacacccggtactagccactgcaaaatcatgccaaattgtaaagaccatcgaggctaggaagaaactgcatcaactaacaagcaaaataaccagctaacatcataatgacaggatcaaattcacccataacaatattaattttaaatgtaaatggactaaatgctccaattaaaagacacagactggcaaattggataaagagtcaagacccatcagtgtgctgtattcaggaaacccatctcacgtgcagagacacacagaggctcaaaataaagggatggagaaagatctaccaagcaaatgcaaaacacaaaaaggcagaggttgcaatcctagtctctgataaaacagactttaaaccaacaaagatcaaaagagacaaagaaggccattacataatggtaaagggatcaatgcaacaagaagagctaactatcctaaatatatatacacccaatacaggaccacccagattcataaagcaagtcctgagagacctacaaagagacttagactcccacacaataataatgggagactttaacaccccactgtcagcattagacagatcaacgagacagaaagttaacaaggatacccaggaattgaactcagctctgcaccaagcagacctaatagacatctacagaactctccaccccaaatcaacagaatatacatttttttcagcaccacaccacacctattccaaaattgaccacatagttggaagtaagctctcctcagcaaatgtaaaagatcagaaattataacaaactgtctctcagaccacagtgcaatcaaactagaactcaggaataagaaactcactcaaaaccgctcaactacatggaaaccgaacaacctgctcttgaatgactactgggtacgtaacgaaatgaaggcagagataaagatgttctttgaaaccaacgagaacaaagacagaacataccagaatctctgggacacattcaaagcagtgtgtagagggaaatttatagcactaaatgcccacaagagaaagcaggaaagatccaaaattgacaccctaacatcacaattaaaagaactagaaaagcaagagcaaagacattcaaaagctagcagaaggcaagaaataactaaaatcagagcagagctgaaggaaatagagacacaaaaaacccttcaaaaaattaatgaatccaggagctggttttttgaaaggatcaacaaaattgatagaccgctagcaagactagtaaagaagaaaagagagaagaatcaaatagacgcaataaaaaatgataaaggggatatcaccaccaatcccacagaaatgcaaactaccatcagagaatactacaaacacctctatgcaaataaactagaaaatctagaagaagtggataaattcctcaacacatacaccttcccaagactaaaccaggaagaagttgactctctgaatagaccaataacaggctctgaaattgtggcaataatcaatagcttaccaacgaaaaagagtccaggaccagatggattcacagccgaattctaccagaggtacaaggaggaactggtaccattccttctgaaagtattccaatcaatagaaaagagggaatcctccctaactcattttatgaggccagcatcatcctgatatcaaagccgggcagaagagacacaaccaaaaaagagaattttagaccaatatccttgatgaacattgatgcaaaaatcctcaataaaatactggcaaaccgaatccagcagcacatcaaaaagcttatccaccatgatcaagtgggcttcatccctgggatgcaaggctggttcaatatacacaaatcaataaatgtaatccagcatataaacagaaccaaagacaaaaaccacatgattatctcaatagatgcagaaaaggcctttgacaaaattcaacaacctttcatgctaaaaactctcaataaattaggtattgatgggacatatttcaagataataagagctatctatgacaaacccacagccaatatcatacttaatgggcaaaaactcgaagcattccctttgaaaactggcacaagacagggatgccctctctcaccactcctattcaagatagtgttggaagttctggccagggcaattaggcaggagaaggaaataaagggtattcaattaggaaaagatgaagtcaaattgtccctgtttgcagatgacatgattgtatatctagaaaaccccattgtctcagcccaaaatctccttaagctgataagcaacttcagcaaagtctcaggatacaaaatcaatgtgcaaaaatcacaagcattcttatacaccaataacagacaaacagagagccaaatcttgagtgaactcccattcacaattgcttcaaagagaataaaatacctaggaatccaacttacaagggatgtgaaggacctcttcaaggagaactacaaaccactgctcactgaaataaaagaggatacaaacaaatggaagaacattccatgctcatgggtaggaagaatcaatatcataaaaatggccatactgcccaaggtaatttatagattcaatgccatccccatcaagctaccaatgaccttcttcacagaattggaaaaaactactttaaagttcatatggaaccaaaaaagagcccgcattgccaagtcaatcctaagccaaaagaacaaagctggaggcatcacgctacctgagttcaaactatactacaaggctacagtaaccaaaacagcatggtactggtaccaaaacagagacatagatcaatggaacagaacagagccctcacaaataacgccgcatatctacaactatctgatctttgacaaatctgagaaaaataagcaatggggaaaggattccctatttaataaatggtgctgggaaaactggctagccatatgtagaaagctgaaactggatcccttccttacaccttatacaaaaattaattcaagatggattaaagacttaaacgttagacctaaaaccataaaaaccctagaagaaaacctaggcattaccattcaggacataggcatgggcaaggacttcatgtctaaaacaccaaaagcaatggcaacaaaagccaaaattgacaaatgggatctaattaaactaaagagtttttgcacagcaaaagaaactaccatcagagtgaacaggcaacctacaaaatgggagaaaattttcgcaacctactcatctgacaaagggctaatatccagaatctacaatgaactcaaacaaatttacaagaaaaaaacaaacaaccccatcaaaaagtggacgaaggatatgagcatacacttcttaaaagaagacatttatgcagccaaaaaacacatgaaaaaatgctcaccatcactggccatcagagaaatgcaaatcaaaatcacaatgagataccatctcacaccagttagaatggcaatcattaaaaagtcaggaaacaacaggtgctggagaggatgtggagaaattggaacacttttacactgttggtgggactgtaaactagttcaacccttgtggaagtcagtgtggcgattcctcagggatctagaactagaaataccatttgacccagccatcccattactgggtatatacccaaaggactataaatcatgctgctataaagacacgtgcacacgtatgtttattgcagcactattcacaatagcaaagacttggagccaacccaaatgtccaacaacgatagactggattaagaaaatgtggcacatatacaccatggaatactatgcagccataaaaaatgatgagttcatgtcctttgtagggacatggatgaaattggaaatcatcattctcagtaaaccattgcaagaacaaaaaaccaagcaccgcatgttctcactcataggtgggaattgaacaatgagaacacatggacacaggaaggggaacatcacactctgaggactgttgtggggtggggggaggggggagggatagctttaggagatatacctaatgctaaatgacaagttaatcggtgcagcacaccagcatgacacatgtatacatatgtaactaacctgcccattgtgcacatgtaccctaaaacttaaagtataataataataaaataaaataaaaataaatgggaatttttcttgatttccttttcagatagattatgattggtgtaaagagatgcaactgtgttttgtgtgttgatttttgtatcctgcaacttaattcattttgtgttctttacggttttcttcatataggatcatgtcatttactgagtacgtgctctgtggcaacaattttacatgcatcatatctgtactagtttagaattattataatttttatttgacaaataaaggaacttgggctcagagttgtttgctcaagattatacagctagtaactggcagagctgagatttaaacccagagcactctaactctaactccagagggcatacttttttttttttttaatgccataatcctgctatcgcatcctactttttgagcaaaataaaataatttcaaatttatgaactagtcttaagataaatgggaaaattgtatttcaaaagtgagacagtgataaagctaaggacaagaaaaaaatgttaactttgtatcctgtaaccttgctgtaattgcttattatagttccaggagtttttcggtcaattctttttggattgtctacatagatgatcatgtcatctgcaaacaaagacagttttatttcctcctttccaacctgtatacttttttttcccaatcttattgtgttagctaggatttccagtacaatgttgaaaagcagtggtaggaggggacatccttgccttgttcctgatcttagtgggaaagctttattgttttttaccattaagtatgatgttagttgtagattttttaaaaatcaaggtgagaaatttcctgtctattcctagtttgcagagagtttttgtatttaaaatcattaatgggtgttagattttgtcaaatgccttttccacattcattgatatgtggaaaaatcatatgatttttcttctttagcctgttaatgtgatggattacattaactgattttcaaatgttgaatcagctttacatagctgggacaaatcccacttggttgtgatgtgtaattctttttatatattcttgaattcaatttgctaatactttcgttgagaattttcacatctatgttcatgagagatattggtctgtagttttcttgtaatgtctttgtctggttttggtattagagtaatgctggtctcataaaatgagttagtaagtctttcacttgcttctatcttctgaaagacattatagataattgtgtaatattttccttaaatttttggtagaattcagtgaacctatctgtgcctggtgctatatgttttggaatgttgttaattgttgattgaatttctttgatagatataggcccattaagactgcctatttatcttatgtaagctttggaagattgtgtctttcaaggagttcgtccattttatctaggttgtcaaataggtgagcatagattgttcatcatgctccttgattatccttttaatgtctgtgagatccgtagtgatgatgtcccctctttcatttctgatattagtaattcgtgtccttctgttttttcttagttaacctggcttgaggcttattgattttattgatctaaagaaaacctatcagctttcggtttaatgattttctccattgtttttctatttttaattttattgatttctgcactggtttttattatttcatttttttctgcttactttgaatttaatttgctgtgctttttctagtttcctagagtgaaagcctagatgattgactgaaggtcttctttttttctttttttttttttttttgagatggagtttcgctctttttgcccaggctggagtgcaatggcgtgatctcggctcactgcaacctctgcctcctgggttcaagtgattctcctgcctcagcctccagagtagctgggattacaggcatgcaccaccacactcggctaattttgtatttttagtagagacagggtttctccatgttggtcaggctggtctcgaactcccgacctccggtgatccacccgcctcggcctccgaaagtgctgggattacaggcgtgagccaccgcgcctgggcctaggtctttctttttttctaatgtatgcattttatatatatttccatctaattattgcttttgctgcatcccccaaattttgaaacattgtattttcattgagttcaaaatagttttaaatttctcttgcaagttattctttgacctatgtattatttagaacttcgttgtttaatttccaagtattttggaattttccagctatctttcttttttcttttttaaaaaattgagatgaggtttcaccatgtttcccaggctggtctcggactcctgaacgcaggccatccacctgatttcagccttacaaagtgctgggattacaggtgtgagccaccacgcctggcaggaattttccagctatctttctgtttctgatttctagttgtaactccactgtggtctgaaagcagacactgtatgatttctattcatttacatctgtgaaggtatgttttagggtccagaatatggccaatttggtaagtgtttcctgttagcttgagaagaatgtatggtgttgaatgaagtaatttataaatgtcaattatatccagttgattgatggtgctattgagttcagctatttccttactgattttctgcaggctgtatctgcccattctgattgaggagtgttaatgttttcaattttaatactggattaatcttttgccttgaagttctatctgtttttgcttcacatattttgatactctgttgttaggcacacacacattaagcattggtatgttttcttggagtattgatcccttaaccatttggtaatgcttctctttattcttgacaactgtctttgctctgaaattaatgtagctactcttctttctttcgattattattagcatggtatatctttctttatctctttcaatctgtatgtgcctttatatttaaagtgggtttcttttaaacaacatatagccaggttttgtttttttagatcattctggcaatctgtcttttcattgatgtatttagatcattgatttattttttatttatttatttttttgagacggagttttgctcttgttgcctaggctggagtgcaatggcgcgatctcggctcaccgcaacctctgcctcctaggttcaagcgattctctagcctcagcctcctgagtagctgggattacaggcatgtgccaccatgcctggctaattttttgtatttttagtagagacggggtttcttcatggtggtcaggcgtgtctctaactcccaacctcaggtgatctgccctccttggcctcccaaagtgctgggattacaggtgtgagccattgcgcccagccagatcattgatgtttaaagaaattattggtatttggattaatatctaccttatttaatactgttttttatttgttgctcttattctttgtttctatttttgccttccacactttttcaaccttttatattttttattgagcaatctgtatgattgtatttttctgtcctttcttagcacatcagttctacttctttttaaacatttttcagtgattgtcttagagtttgtaatattcatttataactaatctaagtacactttcaaataacactatacggcttcaggtagtacaagtactatataataacaaaatatttctactctctcatcttttgtatcattgctgtgatttattttacttacatgcttatatatatgtgtgtgtgtgtgtgtgtgtgtctgtgtgtaattaaatgcattgttgctaatatccttttaaacagtcatctgttagatcaattacgaataaaaaaataaaagtttttattttaccctttacgtattcattctcaaatgctcttcctttctttatataaatccaagtttctgagctatatcattttcattctctttgaagaacttttaaaaatattacttgcaggtcaggcttactgacaacaaattctctcaatttttgcctgtctgaggaagtatttctctttcacttctgaacgttaatttcacagggtgtggaattctaggttgatgagtttttttctatcaacactttaaattttttcttccactctcttcttgcttgcattgtttttgagaaatcatgtgtaatttttatctttacttctgtgttcataaggtgtttaatgatttatttttaatttaatttaatttaattttttaagagatagtgtctccctatattgcccaggcttgtctggaactcctggcctcaagcaattctaccacctcagcctcccaaagtgttcagattacaggcatgagccatgagccaccacacctggctgcgattttttctttatgtttaattttttgaaatttgaatatctatgcctaagcatagttttttttgttttctttttgttttgcatttatcttgcttggtgttctctgagcttcctagatctgtggattggtgtctaacattaatttgggggaaattttcactcattattgcttcaaatattgcttctgctcttttctctttttcctctcctgggatttccattacatatgtttacaccctttgtagttgtcccccagcttttggatattctgttatgagtttttattttcagtctgttttctttttgcttttggtattggactttcttttctttttttttttttttgagatggagtctcactctgtcgccaggctggagtgcagtggcagtggtgcaatcttggctcactgcaacctccgcctcccgggttcaagtgattctcctgcctcagtctcccaagtagctgggattacaggcatgtgccaccatgcccggctaattttttgtatttttagtagagatggggtttcaccatgttggccaggatggtctcaatctcatgacctcgtgatccacctgccttggcctcccaaagtgctgggattacatggacatttttattgttatgtccccaagcttggagattctttcttcatcatgtccagtctactaatgggttcatcaaaggcattctttgtttctcttacactatatttttttgtaatctctgtgatttcttttttgcttttagaattttcatgtttctgtttacattatatacctgttcttgcatgctatctactttttccattaaagtccttagcatagtccatagtccatagaagcattaaatttctggtctggtaattctagcgtttctaccatatgcgattctgtccagatatgcttgttcagtctcttcagatctttaaactgtgttttttgtcttttagtttgccttataatttttggttaaaaggtacacatgatgtactgggtaaaaagaactgcagtaaataggcctttagtaatgtagtggtaaggtgtaggaagaaggggaagtgtattagttcattttcatactgctatgaagaaatacctgagactgcgtaatttataaataaaaagaggtttaatgcactcacaattccacatggctggggaggcctcacaatcatggcagaaggtgaaggagaaacaaaggcacatcttacatggcagcaggcaagagagaagtggcgagaaaaagggggaaaaaccccttataaaatcatcagatctcatgagaactcactcactgtcatgagaacagcagcatgggggtaaccacccctatgattcaagtacctctcaccgggtccctcttatgacgtagggattatgggagctacaattcaaggtgagatttgggtggggacacagccaaaccatatcagggagcattctgtggtcttatgagtaggtctcagtcttttggtgagcttatgcccctgaattgtgaacttcatcactgtttctctgtccctatctctctccatctccccactcccactcccacactttacatgggaaggaatgacttagaaggggttggaattgggtatttcttttcttccatgtggaaagctagagggagctgggttggctatttccctttccccagcttgatcaggctctgatcaaaccccagtaggctctggtaaaatagtttcttctgaggccaggctttcttaagaacagaatgctctggcacatttcaaaattggttttattttgtgtccccctgctggaatcataagggaatttttctctgatatttgctgtcaggtagagctcctggatgtaaaacgcataaaagtgtggaagcccccatatgactgggtctctctggagttttaaacttacagttgtcttcactgagcctctagcaatccattaattacagttcaggttttcctatcctagcacttgttcctgtggaggtttttgcctgggagtttatgttctgataagttgtgattctcagtatctgcctgtctctctgatatttggggcagtggtttgtcctataactctacttttctgatggttctaagaagagttgttgatttttcagtctgttccagtttttacgtgatgttaggatggagtagcaacttccaagctccttacatgctgaaccagtttattcctttttaatgctgaataatattccatcgtatggatatactacaatttgtttattcatctgttggtggacatttgaattgtttctagtgttgggctatcgtattagtccattttcatacttctgtaagaactgcccaagactggtaatttataaaggaaagaggtttaattgactctcagttctgcatggctggggagacttcaggaaatttatgattatggcagaagaggaaggggaagcaaggtaccttcttcacaaggtggctggaaggagaagtgctgagtgaaggaggaagagccccttataaaaccatcagatcttgtgagaattcacccactatcatgagaacagcatgggcaaaactgcccccatgattcagttacctccacctggtctctcccttgacatgtagaaattatggggattacaattcaagatgagatttgggtggagacacaaagcctaaccatattatgaaaaaagccactctgaacattcatgtttaagtctttgtgtgaacatatgttccacttttcttgcatgtatacccaatagtggaattgctaagttttatgataaataaatttcaactttctaagaactgccaaactgttttccacagtgatttaccattgtacattcccactagcaatttatgagcattccagttgctccacatccttgccaacacttggtattgtcagtgaaaggaagcatttactatatcaatttagaaagactagtttcttctaagcttgccatttgacagaaagggaatgaagagtggatgggactctgtagtttcttcatttggatagctaatgccccataaatctccaaagataccacatttatcaagaaatttgatatttaaattatcaccattttcagcttctcttgtcccaatttcttccaaatggagctaaactcagttcaatctggttttccaattaggtagagtatatggaagctgagaggaagtattatggctgtagactcagtagggcatatggtgagctctgaaaatcctccaagtggttgctgttgagaaattcattgtcggtctagttgtttcattatagataatttttctttgtgacatttaagaaacattccttacctttgattttttttttcttttttttttttgagacagagccttgctctgtcacccaggctggagtgcagtggcgcgatcttggctcactgcaacctctgcctcccaggttcaagcgattctcctacctcagcctcctgagtagctgggattacaggcacccaccaccatgcctggctaatttttgtatttttagtagagatggggtttcgccatgttggccaggctggtttcaaactcctgaccttaggtgatctacctgcctcggcctcccaaagtgctgggattacaagcatgagccatggcgcccagcccttacctttgatattttaatttcactatgatgtgtttaggtatggatttatcctgcttaaaacccaaatttcatgattcttatttttcattaattcagaaaaatagtcattattttctgagtcttattttctcaacagagaaatgtttctctgttctcaacagataaaaatatttctctcttttcccatcttttggaacatagatttggtatatgttgaacattttcatttattctatgtgattcttcatttctcttttgcagtggctataaaaattatcattcatttttcaatgctgcattctagttaatttctccggatcagtcatctagttctccacttctttctacaggtctttaatctgctatttaacctacttaaggggttttaaaaatccagtgcttatgtttatcatttctacatgctttagggattttggtctttaattaatttaaatgttcttatagactataacaaacaattctattttctaaagttcttgggagtctaactctgctttttgttatttctacctactcttgcttacctggattgctttttgagtgtggtaaaattttatttagtaagtcatacttggtggggatcctgtgtggcttacattcatgggatgtctttctagagcaatgtttccattttcttcttcaacttttattttaaattctggggtacgtatgcaggatgtgcatgtttgttacataggtaaacatgtgccatggtagtttgctgcacagatcatcccatcacctaggtattaagcccagcatccattagctattcttcctggtgtagagcagtgttttttaattttcctgcatattagattaatctactgagcctttaaatatcaagatgccaggttgaagctcagaccagttaactcagatactgtgagtatgagactgaagcatcagtgtttttaaaacctcacagtcaagattgagaaccattgctctagagaaaatttgcctttgatttttacaggcactgtgagtgtgttttcagacctggaccagtttaatatcagtgtctcaactttgggttcctgaactatataggtagcataaatttgaaactcatgtttggggaacctttttctttctctcatcaaacatgtaggctgagatagacagattccttgtcatctctttgcacttagagagtagccctttaggggtcatgggggcaaggaagggctctgttctacttcatcaggttgagcaaacccaaggcttcattgttgattccgtatgtctgtgaaatcctgaacttcttgattaccaatattaacaaatgccctctgtgtgacttaaatgtcgatgccagtgcagcagttctatgtttatgtctttttctgattttggttctaaattcctcttacttccgtgagagctcagctgtacatttagaatctttgttatatttaacaattctcagtttttctgtgtacttacatcacactattgctagaaatagaagtcttgctatgatggcattctctacctttgtggccatgccctaccctttgggatcatcctcttttccagatgcctgcctaaaccaagtgtgaacttgctgtgtctttagacatggtgcattgggtttgcaagtgtctatctggcaggcccctggagcttgtatgtgttccttcaccctgcttggcttggtcttggctttgtcttaatccatctggtctctgttgccaaggtctaggcatgctttgaattccaacctacctgaattatgtcaacctctattctttttcttgtgtttccaagtctttgtcttcactcacttgctaaactcaggtctggtttcagtttatttcctggactcatctttccacaaaggactcgctttccctgatttgagggtttgtagcacagtttataacaccatgggagtgagtccagctcaggattcacatttctaggatgccaagatggtctgagcaaatagcttctaactttatatgtcattaaaaaaacacttgttactgagtatgtaaattccaaatactttctattatatattgataacatttgtacctatagtattaattgaagataaatgctgtatcactgattttgtcaggaagaaggataccctttacagttgaggatacacttttgttttttttaaatttgcttaattcatgtatagccatcttcctgtgtatcaaataaaaccagctgtgactggattgtggctcttgtagtccatgcaacctttttactctgagaccttggaaggaagctgagtttggtggaaagcatccagagaactcttggcagccttgatggatcatttaccccagtttggacttttctatctcttttaggaagctctgctgagatcattactgaaacatcagttttcctcagagaataacccctggtcttctgccagtggagttagcatttggttatgaagatggctttgagaattaaataagatacctggaggcaagagtgcattatgtaccggtagtgagcccacagaaatgataggttgcatgattgttggtggatagtggtctaatataatctttaatctttcatctatcaattgcatcctttaggatttgtgttaatgcccccctttcaatcattctgtctttatttagatttctcttcatattttctgtcttttctttcttggcagtatcttcaaaagtaattaggcggctgtcccagaagttgcctttgaagattgttgcaatgtgtatacctgtcaaaaggaattgaccaaaccctgctgaaagctattttacacatcaatttatgagccaatctcagctcttctgttctgagctgatcatccagaatgatccaaaaggaaaccatcagagccaatcatagtgcctggagtgattttcagatgcctttttttcttcttttacttacacagggcactcgggaatcttgcactctggatgaacccagtttacattttggttgggatggggaaagtagagctttagactttattttgaaggcaaaaacccttttatttacataggaaacatttcaattctatatggtttttttttttctctttgttttcttttcttctttccctctatccttccttccttccttccttccatcctcccaccctccctcccttctttccttcctacctaccaacctacatttttttttctctcttttggtatcttggaacatatctaaggcttttggaaaatggacattgttgaagaaaaagtgttatcactattacaaaaatatgatttagaataatggaacctcagatttggaaagaacccaaggattcctttatttcagccatttaactaatgcttaaattctttccaatctagtcacagcccatgatgggatacctacatcacctgcaagtgttgggaaacttctgtgtcctgcagtatcccttacaattttgaacagctctggctgttatttagttactgtttatgttgagctaaaatatactctcctgtaatgcctatcctctgctctttagtttcttttttggggaccataaagagcagtatttttaaaatttcaggctgaaattcagggttgtgaaataattttaattggttatgaccatcattaaaagagaagaaaaaggccagatgtggtggctcatgcctgtgatcccagtgctttgagaggctgaggcaggagggtcacttgagcccaggagtttgagaccagcctcggcaacgtaatgagcacaggtctctacagaataatttaaaaattagcttggcatggtgatgtgtatctgttgtcccaactactcaggaggctgaggtgggaggatggcttgagcccagaaggtcaaggttgcaataagctgtgattgcactgctgcactctggcctgggtgacagagactctgtctctaaaaacaaataataataaataaataaaaggagaagaagaacaaatagaacagaatgagagtagaacaaaatagaaaatatcagagtatatcacaagtagtaaagttttcatgaaacctttgtcttgattttatgtttatttaattatataattaactatgtatgtgcactgtatctcaatggtcaaaagagtttgaaagctgctgaatagaacatgtctcacttttcttccctatgccacccacatagttgagccattctcatgccccatcaagtcttttcttccctacacgaagcatttccatttctttccactcatccatatgtatcacagtctcacatttccttgccacactgaacacagttcaatgaatctagtttgtatgaaaaattgggacctggaatcaaaaacaatgtccctagctatgttctaactgaaacaggggcaagtagaactaccctgttcttggttagcagaatgcacttcactgcattttaatgcagcctgaagtgattagatcgatgaggatgtgtcacagagactccagagccagaggcccctgggctgtgtctcatagtgatgaaatacacagcccaggggcctctggctttggagtctctgtttagtcagtgtaagcctgcagataagctgaagagtaaccaagggcaagttacttctctatgcctcaatttcctcatctgtaatataagcatatttcaaatttgcagtattttataatatttttggattttttttgtgagtattaaatgagttaatacatgtaaaggacagaaaagggcatataataagcacttagcaatcccaaatatttttaaagcaatatcagcaaattattgattcattgaacatttcatcaactcagacatgtagagctttcagcatgtgtataaatagtgtgattatatgtcccattgtgcccagggtagccctagtttttacctattgtcctggcataattaatggtatcccctttcattctcaaaggctccaacagaacctcagatttgcttattccaaatcgtatttttgcagtaggaattaatattttcctcagttgtgtgccatcctagataaaagccacaacttctctcactaaatatttaatcaattttggatttacttggaagatgggatctctctctctttttttttctactgaagtttcacctgagcccgctgcccattgctatacctcctttccttgccaagtggcagaagttagcttcagactagaaactccaaaggggaggctgtcccccttgggcccaattacctgggtttaatttgcccatcattctgttctgtgaagaccttttggattctgattctgtcattcaggatatttactaatcctcaatttcatgttattttcaagtcctttttcctagggagctgacatcccttaaaggttgctttatgtcttaatccaagtaagctgaggttacccaatggggttttccagagagggtttatataaagccctgtggaagtgttaatggttgctatgtattgaacctttattatgtgcaaacaaactgcacagtatccctcaaattaggggtgttgtgaacattttacacatgtatattccctggtcaatgtcacatcaccatgagttaggtgttatctccattttaggggtgagggaagcaaggttgtcacgtaggtagtgaggcggagagctgggacttgaatccagtctgtgtggtgaggatacctggagaacagggcaccctcagaatgaaggtctgaacagaggttcttgataacatagcctttaaactggaaggctttttttctgatgtgataaaattatacttccatatgtaattcatcattctgttgaggtctcatagtccttatttaaaatatcaattatttccataaagatgaaactattaaagcagatgtggatgaggtggaactttgggggttggaggattaataatttgagggacactgtgcagttttttttcttgtaaaacatctataatgtctatttgcttttcctcatacgaatgaaagaatatgtgcacctgtgtgtaacctcctaggcaatgaaacagttggctttctgtggaatagattggtgcaccaaagaccaaagtgccttcctttgaattattttcccactttccatagatttatattcttccctatcatgataccataatcagtgagttttttattgatttatatcagacttacttccaaagagaacttgagtttatatcactttttgttgatgtatcagcaacgttaaaaatattacttctgtattactaacatagtctattactaaaaagtaggcactataatggaatatgtgaatgaattggtgaatggccaacacatattaactttaagaatgtttctctctcacttgtgttttgttgttggtgagttgagctactttgtctctttttttttgacaccaagattttttttttttccctgagacagggtcttcctctgtcgccaggctggagtgcagtggtgtgattatggctcacttaagtgcaagattcttctaagcaagatttctttttttaaaaaagttgtgatgtttgaaagaatgagtctatttcctaaggctttggcttttggagaggtctggttagcttctttgaagatccagtctcacactgactggttacctgcatgacagaaggggtagaaaacagcctttccaagggtgagacaaagacctcttaactgtcactgttagtccccttttacaagcccaaaatagttactgaagccgctagggctgggcatttgccatattaacacctccagcttttaagtggaaagactaggagacgtgagtaccaaagtggatggaagagcatttatatataggtcctaagcatatcagagggaggaaaggctaagcccatcatttgttcctggctcctcctgctgatgcctttgagatgtgagggtcaggttgcttcagcagagcctaaaacttagtctttcccttgtagaaccttttaaatttctacctaagttataattcacatccgaaagcacaccagtctttgatttaagtatttttatatttacatttattatttatttttattatactttaagttccgggatacatgtgcagaacatgcaggtttgttacataggtatacatgtgccgtggtggtttcctgcacctatcaacccgtcatctacattaggtatttctcctaatgctatccctccccttgccccccacccccgacaggcccccgtgtgtgatgttcccctccctgtgtccatgtgttctcattgttcaactgtcacttatgagtgagaacatgcggcgttcagttttctgttcctgtgttagtttgctgagaatgagaatgagaaaaaaagaatgctcatccttttttatggctgcatagtattccatggtatatatgtgccacattttctttatccagtgtatcactgatgggcatttaggttggttccaagtctttgctattgtgaacagtgctgcaataaacatatgtgtgcatgtgtctttacagtagaataatttataatcctttgagtgtatatccagtaatgggatttctgggtcaaatggtatttctggttctagagccttgaggaatcgccacactgtcttccacaatggttgaactaatttacactctcactaacagtgtaaaagtgttcctatttctccagatcctctccagcatgtgttgtttcctgactttttaatgattgccattctaactggtgtgagatggtatctcattgtggttttgatttgcatttctctaatgaccagtgatgatgagcttttttttcatatgtttgttggccgcataaatgtattcttttgagaagtgtctgttcatatcatttgcccactttttgatggggttgtttgtttttttcttgtaaatttgtttacttccttgtacattctggatagtagccctttatcagatggatagattgcaaaaattttctcccattctgtaggttgcctgttcactccaatgatagttttttttgctgtccagaagctctttagtttaattagattccatttgtcaattttggtttttgttgccattgcttttggtgttttagtcatgaagtcttttcccatgcctgtgtcctgaatggtattgcctaggttttcttctagggtttttatgttttaggtcttatgttgaagtctttaatccatcttgagttaatttttgtataaggtgtaaggaaggggcccagtttcagttttctacatatggctagccagttttcccaacaccatttattaaatagggaatcctttccccaatgcttgtgtggcgttatttctgaggcctctgttctgttccattggtctatatatctgttttggtaccggtaccatgctgttttggttactatagccttgtagtacactttgaagtcaggtagcgtgatgcctccagctttgttctttttgcttaggattgtcttggctatacaggctcttttttggttccatatggcatttaaagtagtttttttctgattctgtgaagaaaatcaatggtagcttgttagggatagcattgaatctataaattattttgggcagtatggccattttcacgatattgattcttcctatccctaagcatggaatgtttttccatttgtttgtgtcctctcttatttccttgagcagtggtttgtagttctccttgaagaggtccttcatatcccttgtaagttgaattcctaggtattttattctctttatagcaattgtgaatgggagttcactcatgatttggctctttgcctattattggtgtataagaatgcttgtgatttttgcacattgattttgtatcctgagactttgctgaaactgtttatcagcttaaggagattttgggctgagactatggggttttctaaatatataatcatgtcttctgcaaacagagacaatttgacttcctctcttcctatttgaataccctttatttctttctctttcctgattgcactggccagaacttccaacactatgttgaacaggagtggtgagagagggcatccttgtcttgtgcctgttttcaaagggaatgctttcagcttttgcccattcagtgtaatattggctgtgggtttgtcataaatggctcttattattttgagatacattcaatcaaagcctagtttattgagagcttttagcatgaaggtgtgttgagttttatcaaaggccttttctgcatctattgagataatcatgtggtttttgtcattggttctgtttatgtggtggcttacgcttattaatttgcatatgttgagccagccttgcatcccagggatgaagctgacttgatcatggtggataagctttttgatgtgctgctaggttcggtttgccagtattttattgaggatttttgcatcgatgttcatcaaagatattggcctgaaattttctttttttgttgtgtctctgccaggcgttggtatcaggatgatgctggcctcacaaaatgagttacggaggagttcctctctttctattgtttggaatagtttcagacagaatgataccacctcctctatgaacctctggtagaatttggctgtgaatctctctggtcctggggtttttttggttggtagactattaattactgcctcaatttaagaacttgttattggtctactcagggattcgacttcttcctggtttagtcttgggagggtgtatgtgtccaggaatttattctagattttctagtttatttgtgtagaggtgtttatagtattctctgatggtagtttgtatttctgtgagatcagtggtgatatcccctttatcattttctattgtgtctatttgattcttctctattttattctttaatagtctggctagtggtctatttattttgttaatcttttcaaaaaaccagctcctggattcattgatttttttgaagggttttttgtgtctctatctccttgagttctgctctggtcttagttatttcttgttttctgctagcttttgaatttgtttgctcctgcttctctagttcttttaattgtgatgttagtgtgtcaattttagatctttcctggtttctcctgtgggcatttagtgctattaatttccctctacacattgctttaaatgtgtcccagagattctggtacgttgtcttggttctcattgatttcaaagaacatctttatttctgccttcattttgttatttacccagtagtcattcaggagcagattgttcagtttccttgtagttgtgcgcttttgagtgagtttcttaatcctgagttctaatttgattgcactgtgttctgagagactgttttttatgatttctgttcttttgcatttgctgaggagtgttttactttgaattatgtggtcaattttggaataagtgcgatgaggtgctgagaagaatgtatattctgttgatttggggtggagagttctgtagacgtctattagatgtgcttggtccagagctgagttcaagtcctgaatatacttgttaattttctgtctcattgatctgtctaagattgacggtggggtgttaagttctcccactattattgtgtgggagtctaagtttcttttgtaggtctctggtaactttctttataaatctaggtgctcttgtattgggtgcgtatatatttaggatagttagctcttcttgttgcattgatccctttattataatgtaatgcccttctttgtctttgttgatctttgttggtttaaagtctgttttatcagagacgaggattgcaaccccttctttttttttttgctttccatttgcttggtatatatttctccatccctttattttgagcctatgtgtgtttctgcatgtgagatgggtctcttgaatacagcacactgatgggtcttgactctatccaatttgccagtctgtgtcttttaattggggcatttagcccatttacatttacggttaatattgttatgtgtgaatttgattctgtcataatgatgctaggtggttattttgcccattagttgatgcagtttcttcatagtgttgatggtctttacaatttggtatgtttttgcagtgggaggtaccagtttttccatatttagtgcttccttcaggagctcttgtaagggaggcctggtggtgacaaaatctctcagcatttgattgtctgtaaaggattttatttctcctttgcttatgaagcttagtttggctggatatgaaattctgggttgaaaattcttttctttaagaatgttgaatattggtccccactcttttctggcttgtagagtttcacccaagagatccactgttagtctgatgggcttccctttgtgggtaacccgacctttctttctggttgcccttaaaaatttttcctttgtttcaaccttggtgaatgtgacgattatgtgtcttggggttgctcttctcgaggagtgtctttgtggtgttctctgtatttcctgagtttgaatgttagcctgtcttgctagtttggggaagttctcctggctaatatcctgaagagtgttttccaacttgattccattctccctgtcactttcaggtacaccaatcaaatgtaggtttggtcttttcacatagtcccatatttcttggaggctttgtctgttccttttcattctgttttctctaatcttgtcttcacactttatttcattaagttgatcttcactctctgatatcctttcttccgcttgttcaatttggctattgatacttgtgtatgcttcacaaagttctcgtgctgtgtttttcagctccatcaggtcatttatgttcttctctaaactggttattctagttagcaattcctctaaccttttttcaaggttcttagcttccttgcattggattagaacatgttcctttagcttggaggagtttgttattacccaccttctgaagcctacttctgtcaattcattaaactcattctccatccagttttgttcccttgctggcgaggagttgtgatcctctggaggagaagaggcattctggtttttggaacttttagcctttttgtgctggtttttcctcatcttcatggatttatccagctttggtctttgatgctggtgactttggatggggtttttgtgtggatgacctttttgttgatgtttatgctattcctttctgtttgttagttttccttctaacaggcctctgtgctgcccctccttccaccaagctcgagcgtcccaggtcgactccagactgctgtgctggcagcaagaattttatgccagtggatcttagctttctgggcttcatgggggtgggatccactgagctagaccatttgcctccctggcttcagccccctttccaggggagtgaaccgttctgtctcactggtgttccaggcgccactggggtatgaaaaaaacttctgcagctagcttggtgtctgctcaaatggctgcccagttttgtgcttgaaacccagggccctggtggtgtagggacccgagggaatctcctggtctgtgggttccgaagaccatgggaaaagcgtagtgtctgggccagagtgcactgtccctcatggcacagtccctcacagcttcccttggctaggggaaggagttccctgatcacttgtgcttcctggttgagaggacgcccccaccctgcttcggctcaccctccatgggctgcacccactgtctaaccagtcccagtgagatgagctaggtatctcagttggaaatgcagaaaatcacccgccttctgcgttgatcttgctggaagctacagaccagagctgtttttatttggccatcttctatttacatttatttttatatgtagttatatatttaaaactttatcttgaccacttgatttagagtaatggaaattggagaaatgtatacagtacagaacattctacattggctttttttttcctatttaaaatgcttaaacgttctttaactcaagaactttaattttgctaataacaaagattcttaagcttagtgtgaaacatggaaaggaaacgccagcagcctggttatgaataggatcagcagtgccatcttgtggtaaataccttgaattacaattagaggcacccgcatgggatctgggagactaagaaattctactctatgctcagtgatttacatagaatgtaaaaggtatttctcaccattttaagactttgggtttatataatcagaggaggttcttcctttacaaatgtggcaaagactacagttttctacaagaccttttaatgttgagcttttaatgttacatacaattacattaaatgttactgtatgtaatattaaaaactacagttataatttcaaaaagattatagtacatgaaacattttctctagcagcagctctaatgtgtaataaaacctagtattataggttaaattggatatatctataacataataaggtaagcagctatagataagtcaaagcatggcaagtatatgatcagataataatcctgtttccttcagacctaacatgtggtaatacagtaattttgtgttctttagcttgtctgctgcttttgaaaattcttttcaacagttaacaaatattgatgaatccaactggaaaaaataatgtttacctattcattagttccaagtctgtgatagttaaatacgtgggaccattgtagtttctagaataattacatttaaaatccccagcaccttgcaaaaatatttattcaattcatattttgctttttacgttatcaacacatattagtttagagagtttagcacaaatcactaactagaccagtattagtaatccattggtaattccaagtctcacactggatcatcttgaaaatagttcatgggttactatttttttcattagttatatatgtcatgccgaatcaacattattttcagaagtcattcctctttattttattgcccttttgtgtcactttctttttcaaattataaaagtaatatatgttcatgatgcaagttcagatattaaagtaatcattcctgataaacttaacccctggaaataatcaccatttacagtctggtgtattattttcagttgctgcatttattaataaaaatattttctcttttcagttggtcagaggtaggggcaccccatcttcatttccctcagtggcactttcttccagaaaatttgctgacaatatgttttttttgtctgctaagataactgggaatttcattaccctgataggaaattttgatttttattcctagttttgctgtttctcacttcctgcagtgttggatttattgggcactggatgacaacactctgtagtgctatacagatttcctagcatgttcagatatacattaaccatgcatagaaaggttgtagaaagcttaatgactttgcccaagttagctaacatgtgactagccacgatttaaatcccttctgattatacctgtacctaggtgaattcttctggtcccatgactttaaataccatctgtatttgagatgactctcaaatttgtatctttagccctgccttcccccctgagcatcagacttgtatatgcaatttaaaaaaatacatctccgcctcagtgccatctcaaaccttgacttggcaataaagagaatgcttgatgtcctcaccgctaccttttttctcccaaagacttctccattttagctattggcatcattagctatccatttgcctaagcacaaaccttggaataacctttggtttttctcttcttcaagcgtgacatcaatccatcagcacatgctgattctaactacgtttccctaacataagttcatctcttacctaggctaacataatcacatcccaattggttttcctgcttcccctctgtctgtcatcaccattatgtgctattctattacctttttatttttttcattatatttaacaatatctggtattattggcttttggatctattgtctgtcttactttccttctagaatgtaagctctgcaaggcagaaacttttatcttgtcaccactgaatccccaagacctagaacactgctggcaggtaggtttcgtgttgaacctgtaaacaaacaaattaattaatagaagaagtctggtgcttgttcagtagttgggaattcaggaaaattattcctttgctggttttctcagcgctgttttgtatagcgttgaaagaactgaaaaacttttatttaataatgtgttcttgagattgatattagagtcttattatcttagatatacagtatcacttaggccttgctgaatgcattttatgctccctgagatctttttgggagattttctgtggaaacctgaaaaggaaaccatcacagtgctttctcagagaagcaaggctcaacaaatgactgggaagaaacttttgctggttgagagaggtattcagtatgtgcttcaacaatgatgtaaaagggaacaaagagaagtgaatgcaaaacatctttatttgctttggactgcccttcttccactaaggctaactttgaataaagaggaactcgataccgggccaatgaataaatttttaaaactggaaacttaaaatgaaggtttgaggatcctgaaatactatatattttaaaaaatcaatgattcttttaagaaatggaaaacaaagtgagggaagagtgggtagagagattgattggtcattctatatctagtgtaatggaaaaggtattttgtgtcagcaagatctgggttttgattctagtcttgccactagctggccacatgaccttggatgtcttgcttctgaaatctaggcttgttatttctgttggtggtttaggatgatcacatgagatgaatcttgggaaataattcttacaattataaagcacaatacaagtgtaatatattatcctgattatcattatctcaccattctagtatgaggatccagggcttcattctcttgatgttttcaactttgtggtcccagaactccaatggctacaaagatgccaagatctgaactcagagattcatgaaacagctctaaatagttttaaattacttccttgggaaatttttgcttgcttatgtgtatctgagattaacaacagtaaaaacaccttttatatagcaccatcagtgaggctttatgtctttattataaattttggagcatcctccaggctctcaaaatgaaatctctggatctactgaagagagagagagagagagagacagcaaggactttcatgtctttaaaagcaattacaggctcaggtctctgaaaaagtattaagtgccaagactgacgcctctgcaaccatttattcttgacattttttcaacttttttttaagccagactattgatgcattttaataccattagtatttgttaaaattagttcagcagtattattaatttgtcttcttaaaataaaaggcaggaaaacagtattatgcatgtatttaaataagtcccctttccagatattggaaggtatgtttttaagtattctggagaaaagtcattttaaaaaaatttccaagcagaccattttgctttagaaatattgaagatgcaatatgtgaatcatatttggattttaaagcaggatattaaacttcacagtaaaaatgattccatagttgttaaagtccaaagagaggtttacgaagccagcagacagagaaactgaaattcacttggagaggtaaatgacacaggaatggaaacattgaataaataactttacagcaatttttcttgatgttattttatcccttaaaggcagacagatcattaaaattaaaattgtattaaaaatattctctataaaaatatataacccaataaaatgaatgttgagtcagccacgtgtatttctttccaaacccataatttggatttggattggatttccaaacccacaatactaaatttatttagtattttgaaattcatatttgctaggcagtgcatcttagtaaattaaaaaatatatattcccattacttagttcatgtaaataatcctaaaggtgaactgaattggccttactgaaatggaggctcatgccagggctgaccagggaaggtgaagagaggataagagacattttatcttcatgcatttgtgtctttgcatttgctgtttctctcctggatgtgtttcccatcctgggtcatttgcttaaattcataccaattttttttagcatctatttcaagcaccctgttctccactatgacttcactaacatttctagatagatagttgctcctttctattgctgccttgtatgtaactctgttattgcatgtaacacatcatcaataatttgcttacatttctgtagcttttgtatttccagtacctaccttagtgcttgacatatagtaagaacttaataaatgtctgctgagtgaataaataaaaaagtgagtgatagctcctgatcactgcataacatagatacaactcataaagttgtgattcctggcctcatccttgtggggcaagtaggggtggtgggacagaggctacccagaagatgaacagagggatgggttgattatgcaataaaaaacattcattcagcttctggcactgtgccaggtgctgtgggggaaactgcagagatgtgaggtacattgtatctgctttcaggggtttaccagttaggtttaagggcctaatttacctgtatgaatcatctagagggaaattgaaggctaagttgtaagacttgactgtgtgtctatgaggaagttagaaaagttagaaacccacatgagttgaaggagcttggaaaggcttcatgaggagccacaagttaatttgggctcagcagtattgactgaaggaagggctgatgaagtggcaagccttgggctaggtgggagttgaatgggtggctgtgtgggaattggcttgtggagcagtgtttactctgggagaccacagacactttctacacctatggatggattttagagatgctttgaacccctggaattatttgcaaaatgttgtatgtatgtttatatgagcagttttccagggagaattctcagctttgaaagaagtagatgcagattttaaaagaatgttacgttttgtagttgtaatcacgaataggtagcattatcattatttatcttttcatgaagtcttaaagaaagggaaaaaggaagaattcgatggggtagggaggtgaagggaggagggagattcaggctaacaatataggtatcaatatttattaaatgatctttccctgaaagtgtatcactaacatgctgtatctttagctgattgtcaaaagagatcatctaagcgatggaggctacactgcctgtttgagagaaactactgaactaaaagtgaatgaaaatgtatcccattgttgcccaaatgaaaatatacttaattcaaaggcagaaataatttttaaaaattgttagtgctagaaagatgaggtacttataaaaaaaaaaaagaatgtatttcaaccagatcatgtaaaagtatgcccattctcccactgatttttcttctacttgttaatagttttgctttttatacttagcacgttagcatatttgaagtttatgacatcaagtagtgactcaagttattttaatggaaagcaagtcatgttaagatcacttcttgaacaacttatgcttttgtcattgacatgatatgcctaattgaggtttatgttgtatatatcctgattggggttcactgagatttttggatttgtagattaaagtataaattaaattttggaactttaaaaaataaaaataaaaaataaaaataaaaattgttagtgctttaaccagcaaacattattttttaaggattattctatttaggtttttgaatgtagggatttgcctcataatgaaaaatctgcatttcatcataaaaactgaataaaatgaacatgacttggttatttgccatagatgcggattcttttaatattggatgctcagtttgtatagaaaacatttggattggagcccctctttgggccattgccaactagaggttaacatactaatatatcagagataggagtgatggatttctacttctgggtgagtgttacgctatcacatgccctgaagtgatagctctatcatgttgcaattgtgagttaaggaggaaggaaagagatctatgaaaaaataagctgttcctttgtttcctggcttgttccaaaaaggattgcaataaaaaagagtttcatattattggtttatgtaattgataagagcccagtaattgaggaacaaaaaagttgttaagtttatgcaaacgaataatacaaaagggattttcccataattctatctttaggagagtaattaattggataatagttaaagaagatagtaatgttgagagaatgaataggtatataaacctcaattatatcttaaacattagtaagccatatttttacatagaattcagtttaattggaggacctgagaaatttgttgacactggaaacttgtgcatttttgatttataaacctgaaatatgcataactaatgttaatttaataatgttgaattttaatagccttaaagtcaagcattaagaaaaatgctcagatcatacaattttatgaaaaatagactattcaactcttaatgattcaacataaagggccacttcagtgaatgttcaaaatgtattatcacttctgtggtgatctaatcttatttattgaatctggtaacatatatttatgtatatatgaatatgagaatcttaatatatattttaatatatatattattacattattctgtgtaatatactttttgagttcttaatatcttatattttctataaagtcatatatgtggcagatacatatatggagatatttcagattattgtattgcaagctgaggaatgtagtatcttcagaacttgccacttgctagggacgaggttggaatgagaaagtgtattggcctcatggccattcctaagtcttggggccgaaggctggaggttggccctagtgaacaaattacttggaggatccagaagtggctagtgcacaggagacagtgcaatccattcccaatggggagcagtgggtcatgactggatgaaccatatacatcatcagttctgaaaatgaggctgattaaagggcattcaggagcagggtgaatgaagcttctctggggaaggagagaaggtccaggcctttgtaaacaggattgagttttctaggttgcccagtcccaggttgactttggctggaattaaaagtcatggttcaggtagttcaccttttatagtttcgtgcttattaacataaatttacttttattttgaatacattttgctataattagttaaaacaattatagtaacaagatgcttaactctcactctataaacaatagcattatgaagggaatatggaacaaacaacaatctatttatgaagaacagatcagtggttgcagctagggtgggagcagtgactataaaggggtagcaacaggaagtttcttggggtcatggaactgttctggatcctgatagcggtggtgtttacacacatctatatgcattaaaattcatagaatcatctgccccaaaagtccatttaactatacgataattgtttttaaaaagcaaaaaatgctagcagggagataaaaaaaatttttttttttttttgagatggagtctcgctctgtcacccaggctggagtgcagtggcacgatctcagctcactgcaacctctgcctccgaggttcaagcaattcttctgccccagcctactgagtagctgggactgcaggcgtgtgccaccacacccggctaattttttgtgtttttagtagagacgggatttcactgtgttagccaggatggtctcagtctcctgaccttgtgatctgcccacctcggcctcccaaagtgctgggattacaggcatgagccaccgtgcccagccagaaatgtttaatatatcaaatatacacaacagaacaaagtaaatcctaacagtcctagaaggctataggaaagccagagtcctaaaagtatgccatttgcctgtttctgaatgtcttaggttggtggaaggcacattttacctggaagctgaaaatgatttggtcccctagttcttcttttatcttgctttcaaaaatagacctgtcttccttcctttcttctttcctccctctcttctctttctttcgatcattcctcccctccttactctctttctttcttaagttcatgctatctgacatggtgaagtggcattctagattactttttttttttttggtcacaagtgcctactggtggaagggacatgaagggaggatgagaagctggtctagctctgctccaatcctgagggtggacagttgagccagaataaaaccaaaagtgaagcctcactgcttaccagaatacacttgtgtagtgcctacactacctgtaggccttcctgtttcaggcagtaaagtgttgttctggagctgagcacctgctttgagttagaattgagacaggcaccagaagttggatgcagtccagactgatcagaggacccttggaatagactttaagttgaccttgaccctttagtcttctttggattggacttcccaggattactctgtccctttgaaaaaatatatttgtgtcttgggcctgaaccaaattttaatcagtctcctagaaattgtgaagggctgctatggcatggcacaacatggcctgttttctcaatattgtctctttaacttctcatttacttggcaacctgatttctgattttctgaatgggtgttgctgtggacatttgcccagaaaacagctctgagtgagggactatcagagagaattttatgtctcttgggaagggaaaggttaacttttatttccaagaggactggctgcatgagttcttggatgcagcagtccccaggagagtgcggtgtgttgagctgtggctagtgtgtgtagttccacacaggcaggagtgggctgtgcagagctacttgtttacaacagcttcctgaatctgctaatgccagactgagtgaatgaaagattagtttgaagttcttgacccatattctttacattaaacattgatgaccattttttctttcagtccttcctctatgttattctggatttgaaatctctagctatgagataatattaactgaaattcttgacatttgccaaccctagtcacaacccttgctatagatcatttcaacataaagcatttgtcttttagcttgtctgaaaatatactgcagtatgttgctggtggtaatggatttcttggagttgaaccattgggtagaggatttgtgattggagtttaccatctgatttatatgttctatggtcatgataactcagatttgcagatctgggtactactgggactgtggggctattgtgcctgacttaattgcatatttaaatgtaaggctagaagtaaagctgaaaaagcagatggatttggaaaatgagattgtcctgttttgaggtcatatggaaagccaagaaattgctggagcagctctgacagggatttcaggaaaacaggctggtaatatttccacttctctcagcttgcagtctggctgaaaatgtagtaagatcagccttttccaaaggtcttggtatttctgcagctgttttcagaaagccttgaaagtgaaaagcaaaggagtccacagaatctcaagtatccatgctccaatcactaaagctcttggatgatctaagtggaaaagagctgaagccatgtaagtgaaggtgtgtatgacacagttcatgtgtggagtctgctctttcagatatgacatcatgtctgtggcccccaaaagcttccaggaaagcatcggcttgacagcgaggatgccaaaaagtccttgataggagctctgcacattatatttccaccttctattattttagattcttttttgttccattcacctaagtcagctgggccatctgcctaagccagccaacatctcacattttctaattggtctagttagtccagggttaatatgtcacttactatcactaatgagagactgtacttgctagactcgtaaagcatttttaatgaatgcttccagtattatgattcctgttctacagaaaaagaaaccaggtttcagagaatttatgtgatttgtacaaattatttgaacagattagtggatcatgagggctatggaatgtatattttatactgtcagccaccaactttcaagtggttgaagctctccacatatgtaatgtgtttaaaaggaagtttaaaataatagaaatgactagattgtgtcagtgatttttaaatattctgcaaatgaaacttaagtaaaagttcaatatgttaaagctacaagttctattttagcatgaatttatttcacaagttcaggtttctaataactacttatcttcaaattaaccagtaacattaacgaagctatttatgaacacaagtatttgaaatctagatttgtagatgtgagttggagccttaatatctaatatattttaaagttttgttcggttgtcccccactgaaaaaaaaaactgatttacagataaattcttgaaaataggtataattttcttaaaagctaagcctactgaaaatattattcaatctgattgaatcagacacttgagaaattattaacaggtagttttggacccactttgaatcactatctaactatacctgaaaatattcatttttcctcttctctcctaagcccagtccaattaccatcctctgaaacagcatttgtcaaggtccctagacctctgtgtagccaaatctgtccataaattctcagttctcacttcatgggacccatcatcagcatttgacactcttgatcactccacttactctccaaggctcgcgctctcctggctttcttcccatctcaaaggccacttctcagcttcctttctgtgcccccgtcattgtcctgactatctcaaactccctatcagtccttttcaaccatggtttctcatctgaaccaaggacacaaaaaatgattccagagaatattttctcaactttttccaaggaaaataactagttctaggtgcataggaaggaagttaatccatcacatacaatgggtgccttagggctttgtcttaatgtttcttcacataacctcagttgacaaaggttgccagcctcaatccacaaacattaggcatctgatgcattttcatgaccttaactccatctatatattgacaactcccaaatttatatctccagcccaggcctctatctgaacacaagataatgttctctccaatttgatgcaacctcttgtaaatatctgacatctcaaacttctcatgttcaaaaacaaaacccgatctttcccccaaaaactgttccactcagagttgtcatctctcaggccccaaattttagtcatccctgaacttctggtctttctctcacatctttcatccaatcctttggcaaatcctactgtacctatgtttcaaatacatccagaatctgaccaattcttgccacctttacttctaccaccctgacctaagccacatcattctctagagcttgaactattctagttgcctcctaattggcctccctgctttcattgttggacctctacagtctatttcaaacacagcagccaaattgatccagtcctttgctcaaaattctccagtagctcccaattacaatatgtatggtaaaagctggaaaccttacaatggcctacgtgatctgtagtgcctctttcctgactgctgcagtctttttgctgttcttacaatacattgagcaacttccacccagggcactttcccctgctcccgccccaaacccccatggcttactgctcatttctttcaagtctttgcttagatgataccttatcagtgaggcctttccctcccaaccttttaaaaattgtaacggccctaatcactcactatccccattccattgcttatttctccctattgtgtttattattttctaatattttacatggtttgcttatttatttttattgtcttccttttctactagtgtgcagtttcctcaagggcagagattttgtccatcttgtccactactatatgccaagtgtttggaacagtttgcacggaggaatggttcctgaatgaattgaatgcatggtgagcgtttaatttgaaatttgaaatgtgattaatggaattttaatcattttaaattctccttgtattgcacaaaatgcttcttaaatgcacgttgtaacatcatgagatagtcaatccagatacctcagtgcccactcctgctaaatatttactcaaaggttaaaaactgtcattggttttgtatgctgaggccaaatttgaatttttagttgcgtgctggtacttcatctgcagatgtaggtatcatgcatttcaaccctacattgctaggttaatctaattgagtatattgaaaatatcagtaggattccaagtatctcagttctctcccttccccactgtactctgtgtgagttgtagcggggctggtccctgcaggttgcatttctcttggttgggcatctttctgtctgtgttgacctaattgcaggcagtaatgcatgatgagaagcagcttggagaagccagggtattttcccctccttgtctgctgctgtcagcttcctgccatggccacagcttctgtcaaatgattccatcctagtgtgtgagccagctcacaccagttcatgagggacaattttgtttatttttttcaactccacgtttatgtttttccaactccatcaatatcacattgatgacttaaaataggccaaatcctggctttccactgacagagaaccaatttgttaaacattgaccagcacaccctggtgggctcagcccttgcgttctgtaacacccctttttccttttctctctggtctaggagtggtagtggcttccaactgttgctagtccctggcttattcactcttccctgtttaggactcaattccttggtcacctttgtaaagaatttcctgcattaattctcttcccttttagaaacaggaaatgatttctgttttcctatactttgatacaatgcctaaaatagaacaaccatgctatgtttgagtgaacttgagagaacctttagcagcaatacaaaacaaaaatctttgtctcatctgaaatatttgcaccagtgccttgccttggaacacataaaaatactttgatacaaaaagtaaatttctgatctcattgccaaaattattacacattattttgaaatgctacaacttaaagacagcactctaatatagttaacacttaacatgacattatccaatatagttttaagagatgctgccattttgttacctcctaatacttgtttctgaagcttataggaactacttgaatactttttttcaattgcttttcttataagtcattttcagttgctttcctatggcttactcatcatttgtagacttggtcacgttgtgaatgagttacttcatggtatgttcaaagtcatttaaatatctccctctgttttgatgtatgtattgagtgtttttcaaggctataaactcccttaggtttggccacaggaacaaagtgtacaaaaatggagaataggaagaactataacatccatactctcatttagttgaattataaagattttagctgtcttattcatcacatatgttggatgcccagtcttgggtgctgtgagctgtgatatctgacaatggtaccaatatttcagaggcagggaagcctggtcatttaacacattcactgtggggtcagtagctcaggaggtaatagggttcacccagtgtgtttccttcacatgtgttgatgtaacttaccctgaacaatgtttttaaattcatttttaccatttaaatactactggtccagactgagtaagcatccttgaaactatattgtagtcccatctacagtcctacatcaaggcttgttccaaaattgctccaggtcgtagacttggactttaactccatctttatctctatgcccaccttacagagtcctctaaggaatgttctagagagcccatctttctgtataatcagtctatttagagtggagcaagtgatgaaatttaatgtgaaagattccttgattttcatattatcctattgtctgaagattctgatcaatctaataaatatgcaggttaggcctagtctggttttctttatccaggatcccttctatccccagctagagccactagatcactaaatcaatcgtatgtgcaggctgcctctgatttatttccctcgctgctgctggcctgcccctgccttttagccctgattggaatgtttcaatgtttgctttgttctaatactctgtcccttgtactctcttttaaataaccagcctctgactgtcttggttcttgtttacccaccttttcatcagccccttcctcattcttcaagcccaaattccagcttgaagtctgggttctacaatctgttgacagacttcctcgaagcttatgatctgcattcctgaccttcctaggagtgtctacctcacaattttctgatgttatgttgtgcaatgacacctcattttgtttgtttttgctgttgctgactggaccattgtatatcagatgtggtgttttgcctgccagaccaagccttcccgtattgcatgggagtatactagtggctgtgaccagactgattttaagttctaatccctcttcccactcctaccctcaacctgctcagacctgacaaagtaatagggaattgcccacccatttaagtcccataaaaagccatactgcaccactagccacttcaattatgatgagtggttttatgggaagaaaggaattgtaggctgatgatagtagctttgttgagttggtagcactggatccagtctctgagggaaacataatggttggatttcaactttgtagtattattccaggagcatctgtatagtatcataaatatgggatctcacatgacgtcttcctgtgtctcagaaaaatggacagaaagcaggtttcaataatcttttttttttttttaatttgactttaagttctgggatacatgtgcagaatgtgcagttttgttacataggtatacgtgttccatggtggtttgctgcatctatcaacctgtcatctaggtttgttttttttttttggcagagtctcactctgtcacccatgctggagtgcagtggtgtgatctcggctcactgcaacctctgcctcccgggttcaagtgattctcctgcctcagcctcctgagttgctgggattacaggtgcacaccaccacacttggctaatttttgtatttttagaagagacggggtttcaccatgttggtcagactggtcttgaactcctgaccttgtgatccgcccacctcggccttccaaagtgctgggattacaggcttgagccaccgtgcctggcctgtcatctaggttttaagccccacatacattagatatttgtcctaatgctctccctttccttccccctgagcccctgacaggccccggtgtgtgatgttccgctccctgtgtccatgtgttttcattgatcaactcccacttatgagtgagaacatgtggtgtttcgttttctgttcctatgttagtttgctgagaatgatggcttccagcttcatccatgtccctgcaaaggacatgaattcattcttttttatggctgcaagattaaagaatcttttgcaacagatggggaaattgagatttagattgatcaattgttgcccttgagatcacacacagatttgttgataggatagatcctaggttttggttttggggaataacaatccactgtcccagggacttccaaccatttgatgaaagaatggtttttagttctctgaagccttaaggtaatttaatttcagagctggtctggaactgaccttggagattgcctggttattagtctaaaccctcattttcaaggtactgatgacagagaataggaggtgtgttccatttccctaccccggattgtatgactgatgggaatggagaggtagagtaggacagaggtgtatggtctatcaagaaaggcttgaagtcctctctcaatcttttgtgcaaccagttttattaaatggatggaattcaatgggaagtgaaatagggaacaacctctacccaaaatcccaccccaccctccactgccttcaataatgttaggctcttaatttttccatttttcttttttaaaataatattttattggccgggtgcagtggctcatgcctgtaatcccagcagtttgggaggccaagacaggcagatcacaaggtcaggagttcgagactagcctggccaatgtggtgaaaccccatctccactaaaaatagaaaaattagccgggcatagtggcagccacctgtaatcccagctactcgggaggctgaggcaagagaattgcttgaacctgggaggcagaggatgcagtgagctgagattgcaccattgcactccagcctgggtgacagaccaagactccatctcgaaaaaaataaaataaaataatattttattgttttttgcataatgtctttattttgcagaaaatgctttctgcttattgtctttggctactttgtcaaaactctaggtatgtcaactctagctatgatacctgacacaaaagaagcctgaacattacttgaaagcaacaaggaagagaatgaaagtttgttttttatctcactaaagtaggaccattgtttacaaattctggtatgccaaagtcatctatatgctatatgagaaacaaacaagaagtttctggaccctagtgaacagttttttttttctgtgagtcatggtgaattacgcccaactgcattgcttccagccttgaattcacctagatgactcaggacaacactgccactgcagattaccagcaaagtgggaggtggtgatgggactttttgataaatagtagaatatgtattccttcttctattttaaaatgaagttaataaggctttatttccttcctttgacccatgcgactgccattttatacctagtagatccatcagatgaacgctggttgcaaagtcattgcatatttcaagacataggtcttgattcacatggaaggtggtgacatggctgtctatgaggctaccagtaaggttgggctgaggcattgtactggctgtcaggcgtgtctgtgtctgtgacagtcccttcatacagtggggatcctagagctagtagatggattggtgttatgactcatggggcacatactgatgtgggcaggcattcgaggctggaccaactgacaggggattggagcatggataaacacacagatgaattgtcagaattgtaaggctcttgtatcggtttgaaccctgaaagcgcaccaacgaacaacacaaggcggtgtggagcaacacgctgttttaatgtgtgcctgggtgcagacgggctgaggcttaaaagggcatcagcaccaaatgcggacagggtagcagttttatagtctcctgtaaacaggaagtatctcagtctgatgtaactgctatgcagtacctggacagcagtacctctctcggtcttcagggggtacatgtcttccggccagttctcttcctgcttctgccatcttgctgacaaacactgttggcacaagtggtcttgtgccttgggactaggcctcagaagtgaggagttattcaccaccacctccccccgccggcttccaggccctggggaaagtctttcattcttgtctatttggttatagaaaaagggaaaagcgacgactttctcaataactacttcaagcgtgacatagggggtggtgtggccaccttggaaacaaaaacttaattttgggggtatttttgagagatgggttggtattcatcatgtcgttgcagcaggagcatcgtctggattgtctggtggttaactatggtttcaacaagacttttattagcttttattattagtgggataatacaggggagaaacaggaggagcccagtgatgaagattactgtccctaccagcattttaaatcctcttaaattagagaaccaccctcctagaatgtttgttgggtcccatcccttccaggtttggactggtacatgggctacttttctgatgtttgaagcgatttatagtactgtttttccattatcgtctatgttaagacaacaattggagatattaaacttaccacaaacctcaccttctgaagttgtttggaactacccacctggagaaagtacagacaaagactagaagatagtggagctgtttatcgggtgggatgtgagtgaagtctacttgccaatcttgcccaggtacctgtctctgggcttggtgggtaggaaaaggcagtggctggagggagccctggggtgacactgagtggcagatagagcaggactgggtgatttcttgaacacagctggaaaggtgaggacaagtgagaatagggcggagaagttgtaagagaggtttggaactgacatggaaaagttgtggagactttgggggatagggattgtttgagagtgaggaagaacgaagcgcccttccttgacctaccatggtccttgcttttgaaggttttgggctcagaagtcctccttttcttccgaggattaaagaggagagaacaaggacagggacaaaaactggccttgcacaggttgtaggtgtacttgtttggctacctaatctgctagtgcatttccagctgctataggatcgtatggagtttggtggcctctgcaatgaatgatggcaactttctgtgggagcctggcagcttgaaggagtttgttgatgagagagccatgtatgacaggagtgttttttgcagttaggaaacgctgttctttccagatggaagagtgtgagtgcactatgtggaatgcataatgagaatttgaatatatgttgatctgttgtctggctgctagagtgagagcttgagtgagggcaatgagttcagctttttgggaggtggttcttagagggagcatattggcttcaatagtgtgtggggggtgacactataaaatagccagcatgttggtgtccttgatgtaggaaggagctgccatctacaaaccaagtaaaggaggcatctggaaggtgttggtctgttaggtttggaaaatgtataagaaatgtttgaacagtgttcacacaggagtgcgtagggtcttgggtggttgtagcttcaggtaagagtgtagccaggtttagacaggagctggttagcatggtgatgtggggagtttctatgaatagagcatagagttggaggagctgttgggcagagatgagacttagtacactgcagtgagctagcatgtctttgatgttatgggttgaataaactgttaggttggcatgaagagatagttttaagctttcaagggtgaggatagcagctgccgccaatgcttggaggcaggcaggccatccaagaactgtggcttcaagctgtttaggcaacaacctggaaggtgggtcccttagactgggttagaacacttattgcaactccacatcattcattggtgtagaaggagaaaggtttggtgaggtctaggtctgggagagtgaggacgggggctgaggcgagagccttctggagtagacggaaaggttaggtaataggcagtgcagggtttaaaggctcatggagagggcctttagtggcttggtataacggtttggtgagtagagtgaaggagggaactcagagcctaaaatatcctgctagtcctagaaaagagataatttcttgcttagtttgtggaggtgggagggactggaggagggatatgccatcggttgtgagccctcgggtttgcggggtaagagctaggcctagataggtgactgggggggtgcttatttgtgctttcttaggggagacctgatgcccccattctgccaagaagtttaaaagagagatggtatggacattgcagtctctttgagagggtctacataggtgtagatcatcaacatactgaaggagagtggatggttttagggataaggtacagaggtcacgagccagggcctgcccaaaaaggtgggggctgtctctgaaaccttgagttagtatgcaccaggtaagctgatgtgaaaggtgggtgtcggggttttcccatgtaaagacaaagaggttttgggaatcagggtgtaaaggaattgtgaaaacagcatcctgtaggtctagaacagaaaaacaggtggtgttggagggaattgcagaaagtaaagtatatggtttaggaactactggacatactaggggtatggcttggttaatgagcctgaggtcctggactaagcaataagttccatctggctttttgacaggtagaattgatgtgttaaaaggggagtctgttgggcagagtaggtgactgacaaggaggtgagaaatgataggctttaggcctatgagagctgcttgggggatgggatactgcttctgtgataggaactgggtggggactttaagagtaacgtggacaggggtgtggtgttttgtgattgagggtgtggaagtatcccaaacagtggggttaactatggatgggggataaggaaaggttgcatgttttaaggtgggaggttggaggagtagaagaaagttagaagccccagaggggtctgggttgatgcgttgggtactatggggaatgtggaagtggagagtagtgtggagttttgaaaggatgtctctacttaggagcagagttgggcatgagggcaggactaagaaagagtgagtgaaggaaaaggtgtgcagggagcagaaaagtggagaggtggctcggggtttggagacttgtccatcaattcccacaacagagacttgggaggactgggtgggtcctgaaaaattaggtaaagcagagtaggttgccctggtattaattaaaaaacatactggcctacctgccaccatcagggttacccttggatcacatgaagagatggtagttgccggggtgtctgttccagggcactgtcagtcttcagcagcaaggctgatgagatacgagtaggaggttttgactggctcaggaagggatgggggcagtccttgtgggggctgctcacagtctgacttccagttgggtcctccacagagggggcacagcctggtgggcttacctgggtttgggcattgtctggaccagtggccttcattgccacacttgaaacaggcaccaggtggaggtggattgctaggaggcttctgtgtggagctgcggcccccgtgggcccacagagcccctgatggcagaggcaagcatttgaaactctgcctgttttttgccttttacttttctcatcacgattgttaaggactttgaaggctaaattaagaaggtctcgtgtggtttgaaggctgtcgtcaagcttctgaagcttgcgccaaatactgggggtggattgggagatgaactgaaggtttaagatagtggttccttctgggctgtctgggtctaggttggtatactttctcatggcttcagttaaacgagacagaaaagggctgggtttttgtcgggaccttgggtgatttctgaaagcttttcatggttgactgctttatgagcaccctttttgagtcctgtaaggagacacacaatcatgtggtcttgatggcggcgtccaggggccctgtcttgataatcccagtggggggcctggttggggactgcctctgtgtcactaggctgggcaggagcttggtgatgaattgtatcagcatgcgcctgagctagggtccagatacggtcccagtcttctggggtgagggtggaagagaggataacatagaggtcatgccaggttagttcataagactgggtgaggtactgaaactctctaatataagaggtaggatcttctggaaatgaaccgagtcttttgttaatttgagagagatcagtgagggggaagggaacatgaactctaacaatatctttagttcctgctacttcccaaagtgggcactctagcacaggcgctgaagtaagcgtggggcatgggccaaagatggcacctgagcgagtatgggaaggagagaaggaagagcctggaagtggttcctgctgagggtttgaatggggaaaggggggttgagttaacaggcagtggaagataggggcgtaaggtggcgggatgaatttgcaagcctcaggagagggcgctgggggaggacaatgggtacaggcaattctagaattgtcctgaggaggggacggtgtagaaaaagaagtgaatacagctgactgggaagatggcagctgggaagatggcggctgagaagctaaagaggaggcttgggggttaaagaagatggttgagaggggagaggtaggggctgggagaggtagacagcagactgctggatcaaacaaggaaaaagaggtggggtggggaggaggaaggcgatctgggtggtgagaatggaggagaatgatttgaacaggtgagcaagaattgcagaggtcaggttgtgatctgagtgcaaaaaggcctggacataaggaatttctccccatttctccagttgtcggcaataattgcttaaattagttaaaattataaagtcgaatgttccatttgtgggccatttggacctgttatgtaattcgtactgtggccagattgaattgcaaaaaaagacaaggcgcttagggcggatatcttgcatgaggcctaaggtctgcaggttttttatgaggcagtctagaggctgccttttggaatggaagactgggaatttcccataacggagggtaggctcgggagaacagggaaaaggagaccatcctggacggccggagggagatgataaaaggagcgatcgtcactgctgcctttttcaaggccttgttcatgttcccttccccctcactgatctctcccaaattaacaagacttggttcatttccagaagaccctacctcttatattagagagtttcagtgcctcacccagtcttatgaactaacctggcatgacctctatgttatcctctcttccaccctcaccccagaagactgggaccgtatctggaccctagctcaggcgcatgctgatacaattcatcaccaagctcctgcccagcctagtgacacagaggcagtccccaaccaggcttagaggcatccccctaagaccagatgatcagtgagtgcctggcacatgccagagccttcttggaccaacattggatctttggattggagaaaccaagagaggccacgtggatttttctctgttaacccggctcctgggaaatttatcagtagatgagatcagtgactggtgtgcatgcacagagaggtgactggaggctgaggagcttcctttgtccggttgctgtggactaccgtccagggtggaaggacacaagggacgcggaccggggccccttccagatttcggcaccagatgtaaggctcttgtatcagtttgaaccccgagagcgcgccaatgaacaccacaaggcggtgtggagcaacgcgctgttttaatgtgtgcctgggtgcagatgggctgagacctaaaatggcatcagcaccaaatgagaccgggcaggggttttatagtctcctgtaaacaggaagtgcctcagtctgatgtaactgctacagggtacccggacggcctctctctcagccttcagggggtacgtgtcttctgccggccgtctctcttcctgcttctgctgtcttgctgatgcacgctgctggcgcaagtgttcttgcgccttgggactgggcctgagaagggatgagttattcaccccctcaccctcttcccgcccagcttccaggcctcagggaaagtctttcaagaatgtgttggagaactgttccagtgagcacagggctagggtaggaggatgaatgttggttcctcagggcagggtacctttcacagctgtatgtggaaggaagtgagggaggcctccaaactgaggatgggggttggcaggtggacagaaggtactggttctaggaataagctacccactgaatgggagttcctagattggggttcttcctggctgccttggagttcttccatcatatctttgtaattgcttctttcctttgcatccagggaagcttttgcaaatggattgtgtttaattttcagctgtgagctcttcattctgataagctgtcacagttatttatgaactaggtctcggaaagcaatggctagtgatcatgtgttgtggacaccccactctcactatgtgaattcgaggctggtgcttattaaggagtttgacataatcaggccccctctgtgtagctagttgttgatcttgactttgctgagggagatggacaccttcatctagtagggccctgagttgggggaattgggctggatgggcacacacctgagcacctgcagctcaggcttgccctctggcacccattcctggttcccactcctggttttcttccagcgcttactgtgggcctccatgaagtccagcaagaaggagtacatggctcttaaagccaggccagacatgcttggcactggaaacaacttcctggcattcctggtggtgatcatgtcattggtgagctccttgaagcatagccacaacttgctctcctccaggcctatgtgccactttcactctacatggtcacccttctcaatgcctggcttgttgctcacgcttcatggctctcagcaggtggtccactcggtactgcaggctcttcgatgcacactcttaccagtgctgtgggagctcattctcctgcctgcctcccccgcacccccactttcttctaagccccaacttgctacttgagaaccatctttacctctccaagacctatgaaggtgcctgggtccctgtatagacttggaggagggtaaggacggagatctggtcaggaaaggcactggtggtaagggggaaggttatcatacttgaactcctgaaaggcatgactagggcagacctcttgctcttttgtttttgcatcccctgttttttggcaggtgtttcccaggtgtattagtccattttcacactgctgtaaagatactacctgtggctgggtgattcataaacaaaagaggtttaattgactcatagttctgcctggctagagaggcctcaggaaacttacaatcatggcagaaggtaaaagggaagcaaggacattcttcacatggtggcaggagagggagagagcacacaggggaaactgccacttttgaagtatcagatctcatgagaactccctcactatcaagagaacagcatgggaaaactgcccccacgatccagtcacctcccaccaggtacaatttgagatgagatttgggtgagaacacagagtcaaaccatatcaccaggatcacagaagtagtggaagtggataactagaaggaaaagggcaaaaatcccttgcttatctgggtgccatctttctcttggcccttgatgctttccagatgtgacatgcttacatatgtcttctctctcctgagctacacttctgcatctttggaggcctctcacttgggatgtctctgctttacccttctttgaatttatcctgagctcctgctcctggaggttgaccccacaacctgttattgagtcagcccttttaggccgggtcacacacgatgtctcaaggctgggttaccctttgcagtgtgcactcagatcctgggcaactcacatcgttatgcaaagggtagcctgctgcacaccctctgcactctacttttgcacactggttccaaccaactcttcagtgagaagcagaacccaagctctgtgttcataggcacccagattccagaggacatctgtcattttctctcatgaactgtccctggatgtagttcaatgacattcagcccatggagcctgcagtctctcccagcctcagtgagcagttttctgggagccctccaactctcccacccaccactgcacttaatgagtatgtaggaggtgttggggggtgaggtgacagagaagcactctagagaggagtgaaatactatagcccactcttactgggtctttccaaccgcctcttaagattagtaaggttgaatggggtacaaaggtgagagtctaggggcctttagttttccccttggaaagccttggaggggaattcattccatgtcctgttataattatctggagaggtcagctctacattcaattgaacctgtgagtggatttggcaactgtcttgagcttagccctggttgccataactcattaagtttctcacaagcatttactatgttaacagaacgctgggaatggggtgtgggggcgggcggagaagaagaagacattcacagttaacacctctgatgacatctctgatagcaaatagatactattacaagactctatccacccaagagctaaatcgttagtcacagatgcaaagtgctgtgtggtcttgagtaagcctctcagttttcccatctataaatctagagtagcagtgcagatttacttggcaaggtttttctgaggattaaagtaccctaaatcatgtaattaaaatgaacataaagtattttccaaatttgaagagccatggaaatgagaaaaataattactaagagacccagtgaggggctatgtttgaactgttggccattccttgggcagtagtaatttcctggcaggaactggcctgggagggcccttgacagatgttgcacagaactagtttaagaagggctgactggcatgtggtttttattttatctttgtaaagctacagtgtgaggcctgtgacagcaggaggaggccgtgaggtattcacttgacagcctgccattgtcaactctaatgggagagaaacttcagtggctagaagggcagcctcaggttgtaagcgattcatttttagttcagctgcaataactcctgctggtgatttaatcctgtgacttaggaactcttcgtgtgtgcttgagtgaatgaataaaagagagacagagtgagagagagagagagtgtgtgtgtgtgcacgtgtgcacacatgcacacacattcatgtgaacaatttctattcactcacttgtgattaccaatgggccacattctatttaggttttggaggcttggcatgaagcatgttttgctaggatgatttgttttttggacaaggaagctaacatggtaagtcatatgataatttagtttatgtcttcattgttgcagagtttggctgatagcaagggcagtcgagaatgatagtctcatatagaccttaatcccagctcctaaagtagaatggaattgtggaaatcaagttttctggtctaaaataaatgttttgtggcattcttataaaaggaacaggttgaaaagtccctgtggaatcttaattttgccactgcagattattgaagaccccaggtgagcaaatcaactgtgaggaggtgatttttatcagttggcattgaacagaccacagcatagctatcacctgcatggccttcctttgcctttgatgatcgtgtgtgtcagtgggatggaggattttttttgttttgttttgagacagagtctccctctctcgcccaggctggagtacagtggcatgatctcggctaactgcaacttccacctcccaggttcacgtgattctcctgcctcagcctcccgagtagctgagattacaggcgtgtaccacaatgcatggctaatttttctatttttagtagagaaggggttttgccatgttggccgggctggtctcgaactcctgacctcaggtgatccttggcctcctgaagtgctgggattacaggcatgagccactgcacctggctgggatggaggattttaaaaggagttgtattgcctttttgaaaaaaaaatctagaggcaccccccccccccgcttttataatgacccttttgactgaaactttatcttaaaaattccaggataagggataaattagccagttgaatgtgatttccatgtgctataaattttcatattctcccaaaattcctttctcaatgcgatggcatttgggagtggggccttttggaggtaattaggtcatgagggcagaactctgatgaatgtgattaaaggccttataaaagaggttccacagagatccctcatcccttctaccatgtgaggtcacagggagaaagcactgtctgtgaaccagaagatgggttttcactagacaccaaatctaccagagctttgatcttggactttccagcctctagaactgtgagaaatcatttctgttgtttataaaccattcagtttataatattttgttatagaagccctgttggactaagataccatgaatctagagatattttgcatattttattcaccgctgtatccctaggccctagatatgacctgacatttatttaaggtgctcaataaatatttgtttgatgaatgaatcaatcgaaaaagggctataacctcctattaggagtgatctctgggtattggctcatgcttgccttttgggatcatttgcatggatgtcataagtgctaaaatcttaagccacgagaaatatggagcttgtttccaccgcagtgattttctgtgaaatcactacccaaagatttttcacgctttccaaaaatattttttgaatgaacacatgtcatgggtggggaagttttcctcttattgggcagatatttattttcttatttcatgcagatgcccctgtgatgttaacttaaccctactactgggttttccatttttttgcatttgaatcatactcaaacccatgccagagaacaatgcagttcagctttctgatgaccatgtacagtttttgcaaggtggtctatcttgtccctttttaaactgaggactaatttagtataaaagatcatttagagaacctattccatctattctagctttgccagcatgcacagaaacacccaatgccacaaaatcactgaaatgagactcacacaccaggattaagggaagatgatgcttttgatgaaacattagtgaacaaatagaattttagaatcaatgataatctctgcctcattatgtaatttaagccccttgatttgtacctgaggaaaccaaagccctgtggagcacagactaaggacgtataagaactggagttaagacttatgccctctgactgacagtaaattctttccatagtactgtcacagcatgccacagggaacaagtgtctttttatcttttaataactgtatcgaatgcttaaggccagaaagaagagtatagatgttaacagatatttgcactgtaccagctcccagccacctgaaagagcttgatgggtcggcatcagtgagtcttggagagtacatgaagacccgttgctcacagggtgtgaactgggagttggaggcagtctggtgcaggtggaaaggcattgaactggggtggagtgaggaagcttaggttctgattctgatcgagccattgccatgctatatatattttaccttgtttagtcctaattaccatcctactaggtagggatggttattcttattttaggaatgaggaaaccggggcttagaaaggttaggaaacttttttaaattaaggttatacaggctaataagtggcagagcttcatttgaaccccagcctatataatactacccaaaagttactgcccagtttccctctctgagcctcattgaaaagaaaatgtttggatgatctctgacattccttccaggtcacaaattctacatttgatcttgttttttttgttttttttagtgatgtttggctttgaagatttagtccaccccctttcctccctcgttgttggtgaactgattgttacacaaccaacctcacctcattgttggtgaactgattgttggtgaactgattgttatatatggtgaactgattgttatatagattttcacacgtctgtctcccaggatagtgtgctaagaggaccattggagactgtagaagtttgtttcttttaggtgtaagccttgtttctcagggtactatgctttcactagcatcttaaataattaggtgacagagactattaacactttattttcacataacaccaagtaactaagaattgctattattttgccaattagcccatgcaatccttagctcataaaccaaactattatcttcagatacatattagtctcgattacccagagaaacagaaccaattggagacctatatctatatctatacctgtatctttctataactatacatgtagaaagggagggagggagggagggaacgatggagaaagaaactataaggaattggctcatgtggttatggaggctgagaagtcctagaatctgcagttggcaagctggagactcaggagagctgatgttgtagttctagtgcaactctgaaggtctgagaaccagtagagctgatagtgtaagttctagtctgaggagaggactgaagacagaagactaatgttccagctcaaagacaatgaatgaattggatgaggctcacccacattggggtgggcaatctgctttactcattctgccaattcaaatgttaatcttatctagaaacactctcacagacatactcagaacaatgttaaaccaactatccggataccacattgcccagccaagttgacaaataagttaaccattacaatatactagaactattatgtttttacacttcaagaggtgttgaagtgactcagtcgatctaaggggaaaaggtgatatgctattaaaaatataaacacagataaaaactgtatgttttagttagggtaagctaactgttataacaaatagactccaaaatttctactggcttaatcataaaagaagtttatttcttgcttgttacaaagtactgatcaagttaccaggtcagcagagtccctgctaaaagaggcctcttcatctttaatatgtagcttctgaagtcagcccaaatgttgtcttcatctcaaccagctgggaggagaaaagagcatggagaagtgccacatgggaggattttatgagctaggccaggaatggcccaagtcttttctgtcacattcttttgcatggaactcagtcacatggctgcacctaactgtttgggggcggctgaaaaatgtagtccctggctgggcagcccatatcccagcatgtccactgtaccctgtataaagaatcagaagatctgaattctggaattggctttcctattaactggctggtgatcttttcttgtctgtaaaatgtaaaagcttgttgatatcccaaataccttcttgctctagaattctgtgtctctgttttgctctttaaaagaaaatgttctgtgtgaagacagctagttctttgcctggatgcagtgaaggtcctggttcatgcagcaaactttgtctcatgtaggacttaatactggcaaatcagggagccaagtctgggggctcttttgatcctgtactggataaattattattcactgggcatagtaagcattgattcatgggtggcagtttactgtattttaggggtcttctaagtggtgtgtgcccctggcccacatgaagatttttccaaagggttaggtgttacagccagcatttttagaggatcagttatctttaatttttatatgtacctactcctaaactgatcaaagaacatctgcaatgaaagaattttgttagttcttctttcccacctctttcacagttgcccttctctacctttacaaatgaaagtctactgcttactcagcctgcatcttgcatagttcattgttccaagtgtagaaacctctagggcaccaaagtgattttttaaaatatgtgtcacttatattcaagatattaaacatactttctccatctggcacattaaagagtatatttataataaaagttttgctttttatgtttagtaataatttatgaaaagtatatgtatttatgttgttttgatcaattatgtaccactcataattgagaatacagctcagtaaaacattatttaacttatagcctgatagtgacagaaacttaaaaaatattttttatttatatttggtacttttaaatttaaaactattttgccctaagagaaaattctatagcaaaggtgaaacagaaatacaatttcaagaagctaaaggagtgactgtgtgtactcgggtgatgattgagatagattccgcccttgtggctgataaactagtggaggaggcataaacaagtaaattagcaaaagtgcaagataattttagaccatgataaatgctatgaagaaggtaagcaggagggtggtcaaagaaagcctctcagaggaagtggcatttggtatgagcacagaagaagtcttctctcctcttgagcaaatacatcctctcaggttggggcatggatatggtggaagggaagcagagcttatttctgttaaaaagagcttgttcatggctgggtgcggtggctcacgcctgtaattccagcactttgggaggctgagacaggtggatcacgaggtcaggagatggagaccatcctggctaacacggtgaaaccctatctctactaaaaatacaaaaaatcagctgggcatggtggcacacgtctgtagtcccagctacttgggaggctgaggcaggagaatcgcttgaacctggaaggtgaaggttgctagtgccactctactccatcctgggcgacagagggagacttggtctcaaaaaaaaaaaaaaaagagagagagagagagcttgtttatgtatattttaaatggatgctgatggagatcaaattgctttggtatttatattcccactggatacatttaaaggaatgacataagtttgtgatatttaaactatttcaatagtcaccatacactagaaattatatcatttgcaaatatttaaacttacaatgaaaactttttcatatcaacctaaaatgaacaagtggtaaatagtttattaaaatgtttttggggatacatgagcaaaggactttcaaaaccactggcatagtagcttagaatatgggctttgagtttaggctgcttaagttggaatcctggatccactactactggtcgtgtgatgaagagtcagttctgtgagcaacagcatctgaatctgtaaaacagaactgtaatcccagcactttgggaggctgaggtgggtggatcacaaggtcaggagttcgagaccagcctgaccaacatggtgaaacccccgtctctactaaaaaaaaaactacccgggcatggtggcacattactgtaatcccagctacacaggaggctgaggcaggagaatcgcttgaacctgggaggtggaggttgcagtgagccgagatcttgccacttcactccagcctgggcaacagagtgagactctgtctaaaaaaaacaaaacaaaacaaaaaaacgaaaacgaacaaacacaaaaagcacctaagaaggaggaaatttgaagtttacatgagataatgcatgtcaagtgctaatctcacaataagggctgaacaatgttttctatattatcaacattataactttgctctcaactgtatagtgctgattgaactctattatctttcatatggttgcagagcaggctgaaaggtaaattgtgaaatctagccctttgctgaactggagtagcacttaggggcaaactacactattcatttcattctttcctacttgctttatgtgttattgattgatattcattcattcattgatagtccaagttgagtatgttttgagacacttactgagcagtcctgcaccttgactacagtgtggtctcttctcctccttgtagttcattgaagtcattccaaggaaattacagattttccttctctccctgtgcacgtgtacctctagagtgtagggagatgcaatcttgagaagagtacttggtttctccctgaggacaagctgatggcactggctctgtctcctgatgtccttgctgtggcttcctcctttgttctgctaaggccttagggcctttgtgtgacacagctggggattactaggaagaagtaaatatttgcaaagggtgttctgtagaatgttaaaaaaaaatagaaaaaaattaaaggccaggtgcagtggctcctgcctacaatcccagcactttgggaggccgaggcagatggatcacctgaggtcaggagtttgagaccagcctggccaacatgggtgaaaccccgtccctataaaaatacaaaaattagctgggcatggtggcgcatgcctgtaattccagctactcagggggctgaggcaggagaattgcttgaaccctggaggcagaggttgcagtgagccgggattgtgccactgcactccagcctaggcaacaaagtgagactccatctcaaaaaaaatgaaaaaaaaattgcaaaggaaaggggaccttgggagcaagttaacatggtctggtgaggtgaagagaaaagctgaatgaaggtggcattagaaggagagaggatttaaaattattgagggaagtatgattaaagaaactggaagatgaaggtaaaggatggtagaaaaattagcgttaaaaaaatagagtctgccaaaagcaaaagtaaggattcattaagatacatagcagaaggaaaattgtgaaatgaagtaaaggaaaaatacaactgatgaatcaccagggagttatagcaaggccttaaaaatcattaatggaaagtttaatgccaaaatattagagtaaaaagatagcttgaaagtacacagcttgtctgtgcctggctcctaaaaaacaccacagaacggccaatcctttgcctctggcacccacacagcatgcatgccctgaagtgaaatctttcataccgtccctatactccctcttcacacacaagctttgttaccattctttttatttcattcccactggtccaaaactgtatatgcaacctataagaactgacccagcggtgctgccaatgtgcaaagacctgcatccatgggctgcctacttctggcaaaggatcagtttgcttaagttgtccacttcccttgtcatactactgacttgtcaatattacaagtgtttattgacagtcttccttctttcagctgaaggcctttcaagttagggactgtggctcttttgcttattgtagtagtcctggaacctaatgtgtggagaatggattagatggggagagagtaggagtttacctactaccagggtaagaagtagttttggtgagttaagggtgacttggtttagggagttggaagctgcggcataggaaaatgtctgtttgagacttttaggagatatgttttgatgaaagaaaaggacttggtaattgattggatgtgggtactgagcaagggaaagtgtcaaggatgacttggagagagctctgattgggtggtggtataattgagtataacagagaacactggacgaggatcaagtttgcgagggaaataaaaaacccctgagatatcctggtggaaatgttgagttggcagttggatgtatggagctgaaagtgatgtcctttcactcccatttctctagacttgacttacttcctgatcccagatctctgtttccaaccaattattgaacatattatctggaaaaaccacaggctgctcattctcagcatgactaaaactcacctaatcatattcctctgtgtagcctggtttccttcttaaaatcttagtcattcagtgggaattttattttcctgtttcctctgtctctacctgacctgcaaatccattccacccttgtcatgtaagtctttttgatctatacgtctaactcttattttcatttccactgccattgttccactcccactgcctgatgctcattttacccctgcctattataatagcttccaaatttgtctccctgaaactgtgatttcttaacttcaagcacacgtccttattcacactgggtgcaatctttcaaaggctcaatagtaagtatgagttttaaccccacagtatgttagaaaacgcctttccccttctgtcctctgcatacctcaccaatcttgtcttctttgctcaaccaatctgtaatcagatctttggataacctgctattatacaaatgcgcactctaatttaggcacccttgtgcctgttgtttcctctcttcaggatgaagtttcttcacctttggccaccttggatactgttttcttagcttggaatgtgttttcctcacttcattcaaaggaccagcttaaacatcacctcctcatagagacctacactgtgcctgtgtcttggtttagctcccttgcctacttttactttaagacacttatcacaatgatgatggtattatttatgtgatcatttatgtaatgactatctctgtcactagattaaagacctcatagggtcagggtctgtgactatttcattcaccattgtgattcagcatctgtggattgcagttgcaagcatggatagggatgaaattagtcaaagagaaaatttggagtgaggaaagaaagtcaagacagaacactagggaataccaatatttatggagctggacatgaaggcagatcccacagagaagtctgtggaggagcactggagaaggtaagagaacagggcagaacagtgtcatggaagtcaatgatggagaggattccaagaagaaggagagaacacttaatagtctgggaccaaaaaaaaaaaaaaagataaatgaacttgaaggcatagcaatagaacctatccaaaatgaagcttacacacagagataaaaaagaccaagaaaaataagagagacctggaggcaataacatgttgactgacatatgtaaatgggaggcttcagaagagaagagagtaaaagagaacagagataatatttaaagaaataatgaccaaacatctttcatattttatgaaaggtataaactcacagagctaagaaactcggaacatgaagcaagatacctactagggaaaccacaccaagaacttcattatcaaattacagcaagttactaattctgacaaaaatcttaaaattagagaaaaaagggcacattccatacagggaacaacataaaaataattacaacagagttttcggaaactatgcatgtcagaagacaatggagtaacatctttaaaatgctggaacaaattttgtcaatctaaaattctagacccagagaaaacacctttcaaacatgaaacatgtctttccttagacaaagaaaagttgtgagagttggccagcacacctgcagtacaaggcttgttaaaggaagttcttcaggcagaaggaaaatgatacctgatgataatgtggatctacacaaaagaataaagagctctgaaagtgataaatatgtgggtaaactaatttcatcatttaaaaaattttaaaaaggcaacagtagactgcttaaaacaacaaacagcagcaacaatatattgggggaattcatgacatgagaaagtaaaatacatgacaacaatagcacaaagggcattgggggggaaatggaagcacaccaatgcaaaattcttgtattttatgtaaaatattgtaatgtttttccaaggtagacaaataagataaagatgcgtattaaaagccctagatgaatcattaaaaaataaagtatagccaataaaccaatagtattgagaaaatggaatttaaaaatactcagctagcaggaggcagagcaagatggctgaatagaagccttcaaccaattgtcctccttgcaggaacaccaaatttaacaactatctacccacataaaaaaacaccttcgtaaggactgaaaatcagttgagtgaccactgtacctggttttaacttcatgtcactgaaagaggcactgaagaggataggaaaaacagtcttgatttgtcagtgccatccctctctggttccctggcagtggccgcatagcaaagagaatctgtgctcttgcgggagggagagtacagtgactgtgggaccttgcattggaactcagtgctgctctgtcacagtggaaacaatactgggcagaactcagccagtgcacgtggaggaagcatttagaccagccctagccagcagggctttatccatcctagcagtgggaacttgagttctggcaagcctccccaccacaggctaaagtgctctggggttctaaataaacttgaaaggcaatctaggccataaggactgcaactcctaggcaatcctagtgctgggctcagagccagtggattttgagggcatgcaacctagagagacaccagctggaatggccaagagagtgcttatgccactccttccccaaacccacgcagtgcagctcacagctccaaaaaagactccttctttctgcttgaagaaaggagagggaagagtaaagaggactttgtcttgcaacttggataccagctcagtcacagtaggatagggcattaggcagagttatgaagcccctatcccaggccctagctcccagataacattactagacacaccctgggccagaagcaaactcattgccttgaagggaagagcccagtcctggcaagattcatcatttgctagcaaaagagctcttgaacccaaaataatcagcagtggtaggtgggtagtacatgccatgggtcttgggtgagactctgagatgtgctggcttcaggtgtgacacagcacattcccagctgtggtggctatgaggagagactgtttctgcttgagaaaagcagagggaagagtaaaggagacttcatcttgcagcttaggtaccagctcagccacagcagggtagagcactaagtgggctcttggggtccccagttccaagccctggctcttggacagcatttctggacgtcccctaggccagaggggagcccacttccctgacatatgagtcctaagcctggcaacattcaccacaagctgactggagatcccttgggccttaagtgaacatcagcagtagcctggcagtactcctcacaggcctgtagcagtggtcaccatgaagagagactcctctgcttgtggaagggggagggaggagtatgagggactttatattgtagtttgggtgtcagcacagcagcagtagaatagagcaccagggagattcctaagatttccaactctaggccctggctcctggatggtatctctggacctgcctggggcctggggggagcttgccatccttaagcgaaggacatgagcatggctgttttcaccacctgctaattatagaaccttagggccttgagtgaacacaggcagtaggcagatagtggttatagcaggctttgagcgaggcccagagctctgctggcttcaggtctaacctagcacagtcccagtggtagtggccacaggggtggttgtgtcatctctcccccagctctaggcaccacaacacacacacacacacacggagggaagaggaggaggaggagagagaaagaaacggactctgtttctttgggagaaagtaagggaagagaataagagtctctacctggtaatctggagaattcttccaaatcttatccaagatcatcaaggcggtacctctataagtctgcaagagccacagcgttactgagctcgaggtgtccccctaatgcagatacagctgcagtgaccaaaaactcagatgacaatatccaagttcctttgaatacctggtaagctttcccaggaaggatggtgtattagtctgttctcacactgctataaagaactgcccaagactcagtaatttataaaggaaagaggtttaattgacggttctgcatgtcttgggaggcctcaggaaacttacaatcatggcagaaggggaggcaaatgcatccttcacatgatggcaggaagaattgctgagccaaggctgaacttttaaaaacccaattatgtgtagtctataaaaatttatttaaataaaaatacacaaaagagaaaagctgggaaaagataaagctgttttagttatattaatagccaaaaaaaataagaactattaccagggataaagaggaatatttcacaatgatggagtcaatgaatcaataaggcataacattcctaaatgtgtattcaccttataactaaacctcaaaattcattaagcacttgacagatctggaaagataaaaagataaatctacaattataattgcaaatttcaccactccttttagtaattaatagaacaagtcaacaaatagaaatatggaagaattaaactaatcatcaacttgaactaattgacatttttaagaacatgtcacttaacaaatgcaaaatatacattcttttctagtgcagtggagcatttaccaagatagaccacatgcttagccattaaacaagtctccagaaatttaaaaggattgatatgatatagagtatgttttctgactacaagggaataaattagaaataagcaatagaaagatacatagaaaatctcaaaatacttggaaattaaatagcatacattgaagtaattaatggtttaaagatgaaataaaaaggaaagtagaaaatatttgggggtaaatgaaaagaagacacacatatcaaaatttgtgaaatgcagcctaaagggaaatttataggcttaaaagcttaattagaaaagaagaaaactctataagcaacaggccaagcttccatcataagctagaaatataagagcaaattaaaccccaaactagtaggaaacaaatagtaaagaagagaaataaatgaaatagagaaacagtgaagaacaatgaaatcaaaatctgattctttgaaagatcagtataatagataaactgctggctatattgatcaaaaaaacaaaaaggatgacaaatattaccaatatagataatgaaaaaggggacatctctaagattctttatatactaaatgtctataattaagggaatattataaaaaaacttgatgttaataaattaaacaaccttgatgaaatggacaaattccttgaaagacacaatcaaaactaactcaagaatcaacagaaaacctgaatatcaattaagcacattaatttgtaattagaaatctttccataaaaaaatgtataggcccagatttattacctggtcaattctattaccgggtcagtttattacctagtcaattctatcagacattcaaggtagaaatataagtgacaatcccttatccaaaacgcttgggaccagaaggactttagatttttgattttggaatgcttccattatacttaccagtggagcatcccaaatccaaaaatttgaagtctgaaatgctccaatgagcatgttctgtgagcaccatgttgttactcaaaaagttttagattttgaagcatttcctattgctgatttttggatttggaatgttcaacctataccactatatgaatttgttttgaaaatataggagaaatacttttattttatatggtcagcacttttctgatctcaaaaccagaccaaaaatattgcaaataaagacaactacagaataaaattacttatgaacatggaccaacaatcttcaacaaaagatgtgcaaactgaaaatgaaatatataaaaaacgtaatacatgataatcaaataatgtttatcctaggaatacaaggttgcttaacattacaaaattaatgaatgtagttcatcttattgtcataatgggacaaaaaccatatcatcatttcaataaatgcagaaaagccacttgataaaattaacatccattacatattatcatattgtaccataatcatcttccagtaaactaagaatagaaaggaacctcctcaatctcataaaaggctgatgatgacacatttctatgaatatactaaaaactaccaaattttacactttaagtgtttgaattttatggtatgtgaattattaaactgttttttttaaaaaacctgttgctgacttagtatttaacctgagtgcttttgccctaagatcaagtagacaaggatggtcactctctccacttttcaacattctattgaagactcttgccagtgcagtaagacgaggaagaaaaataagaggcacataggttagagagctacaagtaaaactgtctttattcacagatgacatgatcaagcatgcagcaaacagcaaatcttcatgaatctaccaaaaactagtagaactaataagtgattttagtaagatttcaggatgcaaaattaattgcatttctatatattagcaataaacagatggaaattttaaaaaggacaatattatttgcaatagcatctcaaagcatgaaatacgtgagtatgatgattaattttgtgtattagcttgactgggctatagggggcccaggtgtttggttaaacattacttttgggtatgtctatgaaagtatttctagatgagattaacatttgaatgggtagactgagtaaaacaggttgccttccccagtgtatatgggcctcatctaatccaattcattgggagcctgaatagaacaaaaagcagggaaagggagaatttcctctctctgtttttaagctgggacattggtctcctgcagtcagactggaacttataccattggctcctaggtctttggacttgaactggaacgtatatcatcagttctactgattctcaagcctttggacttggagtagaatttacattgttggttcttctggttcttaggtgtaaggacttgaactggaagttcaccatcagctctcctgtgtttccagcttgcagatggcagatggtctgacttctcagcctccataattacattagccaattccatacatatatagccaatttatatacatatatagttggttctgctcctctggagaaccctgaccactccaaaggggttaaattaaataaagtatatgttaaaacccctaccctgaaaactggaaacatttctatgtgaaatttaagaatatgtaaatgtattgatttatgatgtttatagattggaagacctgaaattgtgatttcagttcctcgaattgatttatagatttgatgacattccaataaaaatccagattttcttatagaaatgttcaagccatttctaaaacctaaatgcttagaataaccaaaacaattttgagaaagaacaaagttagaacacttaaacttactggctttaacacttactgtaaagatacagcaatcaagttggtgtgttattggcatagttttgacacatagatcaattaaacacaatcgagaacccagaaatagacgagcatgtgtatggccaattgatttctgacaaagatgccaaggtaattcaatatggaaaggaataccttttcaacaaatggtcttgaacaacttgttatccacatttaaataaattaacatcaacccttactttatggtacacaactggataatcttaaatgtaaatgctaaaactatacaacttctggaagaaactttataaccttcacgtaggcaaagatttcttaaacaggacacaaaatagcataaacataaaaagtataaaaaatttataaattgggctacatcaaaatttaaaacccgtttataagaaaatgcaaatgcaaaggtagacctcagacagataaaatatatatgtgtgtgtgtgtgtgtgtgtgtatactattttatattataaggactgatatctagaatatataaagaagtctttcaactcactgatagaaccaattataaagtcaataaaatggacacatttgaacaaactttaccaaagaagatacacagatagccaatatatccatgactagatgctcaatatcattcatcattagggaaatgaaaattacaaccacaatgtgatatcactacacatccgttagaacattagagtggctaaaattaaaaggaccccaaatactaactgttgatgaggatatgaaaccactgagattttcctgcatacaccgcttatgggaatataaaattgtacaaccactttggaaaacagttttggcagtttcttataaagttaaacatagatttaccataagattcagcaattctactcttaggtgtttatccaagagaaatgaaagcatgtgtccacaaaaagagttgtacacaagtgttctttcactttatttaaagtaacccaaactggaaacaacacaaatgtccatcagcaggtgaatgtataaataaaatgtttaacaatggaatactacttagtactgaaaaggacaaactatttaaacatgtaccaacatagatgaatctcaaaataaatgtggtaagtgaaagaagaccgaaaaaaaagtaggtattgtatgatattcaatataaacctctagaaaagaaaaacttaacatatatttacagaaagcaggttcatggttgcccggggccagtgatagggtgagatcggctgggaaggggcttaagagaatgatcttttgaagtaatggaaatgttctaatcttgactttagcagtggtaacatgggtgtatactatttgtcaaaagtcatagaatatacccttaacatgagatatgtaaactatccctcattaaaattgtgcttgtatgtagtagttgctgtttttgaggggcaacatcttggagtcagtaaagggaaacattataaaggtgttgacaatttctccatagtataaagcctgttccatattgggcactgtgtcaggcattcctgtgactcttggctgtaatacaaagcaacttcccacttaaatactggctaagaccaagagccagggttccctcctagaagtcccaagctggacccagaggaaggtgctaacatggtgtgtttcggccacaggtctctttcagaggaccacaaaactcactacctcccctctctgagataatggagtgagtgtgttaggttggctcagtggctcagactaaagcgtcagggactcttatatttaaaattgatgtcactgctaatgtactgcttgaatgtatctaagcccctgcctttctatttcaatttcctctgtggttacaggaaaccaactatgacagtccattatacatggaaggctagtgttgccagattttaatttggagagtacagaacataattttgactaattggtccagtaggaactagagtagaatctaaacaactctggaggtctgtggcaatgaaacagggaaggagggagagatttaatcaaccttcacccaggcaggctgttgacagatttctaggctgacttaatcaatgtacttatttctcaggtaagacctcaaaactatttggatctaatttcactatacttcatcctgttcatgatattatgctttcaaagtaacaagcctcgaattccttttaagggcacacaaaagagtaaaacacactttctttttgtcccgtctgaagtggacaaatggagtgggtgcatagaagttgtaactctgagtccacttaagttttgcaagtgtataagtcatttttcagtacacaatgaagttaacaattaatatctttgtggtatccagaaacaatgtcaaccaaaattggagcaatgaacctgagaattgaattcacttgagctataaatcataaacccatcaatctctagagcagaagcaaaagtgaagtcattgaatattataatagattccatatgttgttttaaagaaggcttaaaaataactagacttacaggttaccatatttctgtggcaaaaatttacatatgtgaataagaagtgaaataactgactgtccaatttttgcttctgttttctgccacttctttttagtagtggaataattatttagctcttgaagggcagggcagaggaagtgtgataggcactagagaatgtggaggagctgataaaatagaatatgaagggaggtagaagaaactgactctcagctttggtagaaaaggtagcacagataaggaagcacaatttcagataaccctcttggcctttcccctgctaccttattacagagagttagtgtttctccttaagcattaaagttacaaagccaaatagtaacatggccacaattctgtgaaaattttgaaaggccatgacaaaatgaaaatgaaagctttgttctaagtcagacagatctgttttcaaatttggaccctgctctgtgaccttgggcaattcacttaatttctctgagcttcagtttcatctggatggggaattaatacttacctcaaagagctctcagtgtaatacacttgtgtatttctctcttctaacacctatcctgtcagtttgaaatataatctatcattttgaaatgtatctctttcttctcatacgattgtagacttcccaggaattgagattaagaactcccagctcaagggccaattagtggagaacacaggcttaacttatctttgtttcgccctgccccatacacacctcgcacaataattaggctatagctacgtaaaactttagggacttcttccttcctgtgacagcatggtgctaggtgagatttaaggaaactacacgtcatgtccctgcaaatttgccatcttgttatagtcagtcagattggcccactaaccctccagctagaaagtcaggaatgctaaatcttatatttgcatgattgctgttgtgctaaggtgtcagaacgcaagatacaatcttagttcaagtttacactttggtttatgggaaatagcaaggtcaatctgtggcaatgaaaaaaatggaaagtcctgtaaaagtttaaggagggaagaataaaaggaagagaaaagaaactgtaacccagttggaatgaaatggtaacatggaatgaaatgatcctctttccccccagacagatgttggcatggatttcatatggactctgaaactaaagccgacacccaaccgagtgctcaagccctacattccatccacccctcatttgttagtatcaaaattgaggcatttcacaaacttggctatcgaatactgtatgtgtgtggaaaagggccagataaaatgggccaattagaacacagccacatctgtcaaaactctaacccttaaccttagtgaaaatataatctaggatcaaacacagaagccccgcagatgtacacaagtcatttaatgcagcccttggaaagactgtgatgaacagctggtgctattgtgaaggcctgatgagaaagccaggcttggttttgctacgaatatttgcaattttaaagaaaaaaaataggttctaattgagtaaccattgaatgtatcccagtaaggtccttcccataggctgagttgaaaatactctgactccgttgctatgcaaagcagtttctaaacatgttttgaaaatccgtttgaaatttgagagtagaatttggttctcaaaggcttcatttaggcttaaaaccttttggttcactctaaaataatgcgagggtttcatccttaatggactatcgaggttaaattcaacagctgcttctcctctgatatatatttatgaatgcaggatgcattctatatggtacagtacaccctcacagagctctgagtaagaggaaaaaaacatggaaacaaatttttttttaatgttggagtgtccttacggggtttgctaaaggacaaatggggctctcattaaaaatagggattgtatcttcttgagtatacatggatcgtgaccaacacaacagtttttactgaatttactgataaaaatgtcactatgttatgtcaagctcaagtctttgggagggtttttcaggattctgtaagatatggctttgactttgtattcgcttttgggcaccaggtcatcagggaaaagtcacaagatctatgcaaaaggcagcgtcaggaagcagcatctctagtggtttccccttggtttcattgtccctgtgttcctgtgttcatctgggttattgagtctttgatcccacatgggaaaggtttgccatgttgagccagtagtagtataactcattctaactaaggcacatagcttctgccctctcccctgctggatgagtattggaccaattcctttgtccttagcaccacttacaaggatttatttccattccagaggatttattcccattcagagaaggaacaacatagttagataggaataaaaatgctactctgtgtataaagcttcttgcacctagctaatctagcaaactggtgttttggtcttcaacactaactagatcattattatgtgacactaattaaagggtcttctgtaatgggataaggtgttatctgatcaaatgaaggaggaatgatatttggcagtatatggtatatgtgaaaatcatggtgttcttgctacttagagactgtgagaagggataaggattggcttagagccagctcactctacatgctctcccagaagtgttttcttgaaagagtttttccccattgggaccttccattttcctctggcttagtaaagtgactgtaattaaatagattcaatttctgtttatggtgaagtaaaagattgagaacagattgctctttaacctgaaatgtggaagggctagtcgattcggaagctagttaaaatgattttgtgtattaactggtaaactcaacagattttttcccctgtgaatctaacatttctagatctttgcattcctcccgtgagaagtccacctctgaatcctttcgagagctcagattcctaggaactcagatttttgaacatctacatgatgttattttgtaagtggaacactgactattaaaggatagcagtggagtggagtggtgagggcacagctctgggtcaggataactggagagaaaccctaaggcttattccataatctctcttgatttgagcttctgaggataaactgaggcttgtaacatgctagcccagtatctggtgtagtaaatattgaatgcactgtggtggagagggttgtgttgtcaatgttgctgttgttattgttgagacctaaaggattgctatgatctaaatcagcttaatttccttcaacttgataaaaattagcctgtgactattgaactggatgatgctctcctaatggtttttgcattttgccttcattcagccagttaaagctggtgtttacagaattgtgaaacatttgagcctgggacagtcatgtgatttacagttttgtcttgtttcatgctttccagcaacataattactgaactttttatcgtaataaaaatataggcaataaaaaaggcagtcccctggaattccctctatctctcttagaatgctaaaggatatttttttgtgatctcagctctgttctgttaagtatcctctcccttccccacgtctgtctttgcagatttgtgaccagacggctgcactgaatggagactaggaagggagcccaactgttttccttgtgttggccctctgtgccgagcagggattgttgagcaaagcagggattgctgagcagcgtttctccagggagggtcacagggtagtacaaacccactctggatttttcttttttttttaattattaaaaactttggccaaatactatcagtaagggggagaaagtatgtggtttgaagaccagttggaccagtcttttaaaatatcaactggaataaagcaagaatgccttacacttctttaattttctacatttaacaggagacagttgctcccagagtcacttctaactccacagacagtattgtgcaaccttgctcagcatttggagacactatataattaaaattcctttgaaaatggttgcccaatgattgacatttattccaaaatacattatcatgttgaatgcttaattccttcttccagtacattttctttaataaaaaagtaaaaatctattttttaaaagggtgatggagttttgtaaaaaattgaagcagtgtaacaaacttatgtctaatcttgctcttaaagagctggcaggctagcaggggagaccagagtaagttatggaaagcaaaaaaagcaatactcaggatataactgagttgccttatatagatagacttgaaatgctgctgagattccaaagaggaagagataataggaatctgttgctctcttacctcctagtacattgactcatacctccacttcaaacacaagcaacatttagtattactacgaaattatctaatgggcttcctttctcagggcagtaggaatctgtctctctgctgtggctttctggagtccttcccttctgatgtctgtctgtgccccagtttccattttcatatggtcatctttgattctggatagctgcttctctctgtgttctcagaagaaatagactagtgagatcactgtcatgccccctccacaattaggaggctgtatcttgagaccttcttggatcccacaatttgtagatatcacaatagcaatcatggttagagaagtctaccaccaaaccaggagttagatgctaaggatgggtgagcatgtccaaatagcagctttaaaaagcctcagcacacttacaatagactacatgtcagagttttgggttatctctgaatagtcaaaaccccgatattatatacatgtatgtaaagaggctattttaatatcatactgtttgtttgacttttgagtagtgaatgcataatatgggaataagtacaatacgtgagtgaaacaccgaaatcacctttcactgttttgtttagtagtttggagccttcagttcttctggaaaaataattcaatgcacattagttttgctttctacatttgagggaggtgaatgctttacttttgtaactgtaagaggtctcagcagtcttgtagcctattcatattaaagataaggacactgaggccaagaaaggtgaaatggcttgcttaatggttacacagagaattaactgtagcttcatgattttaactcaggtcttgtgactagaatttcagtgcactttgcattaggcaattctgaacctttgagtaaaactaaaatgcaaagactgctcttgatagcattctaggtggaagagttgaagatagtaggatataaagataaacaaacctatcttatctggacaggacctcagctcattaggaagaggaatgaggaagagagaatgtaggaggaaagaaatggcagaaagacaaataatcatgggaagggactggaacagggtaaatgccagacattttcaagattagaagaaatctgagttgagtttgaaaaattgaaagatttcttcaggtagaagcaaaaggaaaataagcagaaatattatcacatataagggagtctgcagaggaagaagaaaagcatgaccctaatagataaagataagaagcaccaaatcatttcaataagtttctgaattttaaacactttcttttccttccaaaccatttaaagaggaggaggaggagaaaaaaataacgatttgtgagggatgtctcatatgctatttattataagaaggaaagtaaaattcaataaattacaaaatgatgtatcaaacaaagttcagcatggaggttaataaaataaatacagacttgagtggagttgtgtcctagcacttacttttaaagccatgtttcaaaaaaagggcatccatggaagtgatggataatttttatctgatagcaagaacagacactaataatggcaagttattgtgttcttagattgttattttaatacttaacgttttcaagattagcctctgagaagctgctcatttacttttggtgcataatgatcacttagggtatgaagccatcagctgcgccctttgttatgaccatggaaaatgttatgacctcctgtcaatgattattttggaaggaatagaagaaataagttatgattacatattatagatattataagcatagtgttagtaaatattttaaaaagaagactaggcacagtggctcatgcctgtaatcttagtactttgggagactgaggcaggaggatcacttgagcccaggtgagaccagcctgggcaacatagtgagattctatctctacaaaaaaaaaaaaaaaaatctttccatggctttctcatctgcagattgtttctcagtgtcaagcaagcacatctttcttccatcccacctgtcttccctgttttaattttatttctgtgcttcataaggttgaggcagtatgcaatcacaatccttttacaattacaaaaaaattcccaaacaattttcttttttaatttttgagaaaaattttgcttttatgctctctgatcagatttgcctttatatacatacaggttccttttttcaccccactcccaacttaaggctgattttaccatccagttgtttaaacaaaattctgttttgggtatcaggtgttttaaattaaaaattcttcaaaattgatttccaaaggagtccgtaaggcttacgatattttagaccaattcttaactagaacagaaaattttgccttttaggtttacagtgatttcatattatctgatgattctgttgaaggggcccattatttatggtatttgcctggaggttgtcttgtaagccttgactatgtgttttaagaaagaaggcaggctgagtgcggtggctcatgcctgtaatttcagcactttgggaggccgaggcaggcagatcacctgaggtcaggagttccagaccagcctggccaacatggcgaaaccccgtctctactaaaaaatacaaaaattagctggaggtggtggcagatgcctgtaatcccagctactcgggaggctgaggcatgagaatcgcttgaaccctggaggcagaggttgcagtaagctgagatcacgccactgcattccagcctgggcgacagagcaagactccgtctaaaaaaaaaaagaaagaaaaagaaagaagtcagcagttcaactataagatgcacagtatatcagaggtagtggaaagtctacatatgcctcctattttaattttaacaaaaaaatgactctgtcacatagacttctagctctttttagcggaataggtaggaaacctataatgcatgaattgtttaaagaaagtatcgaggctgggtgagatggctcatgcctgtaatcccagcactgtgggaggctgaggcaggtggataatttgaggccaagagttcaagaccagcctggccaacatggtaaaatctcgtctctgttaaaaatacaaaaattagctgggcgtggtggcaggcatctgtaatcccagttactcgggaagctgaggcaggagaattgcatgaacccgggaggcagaggttgcagtgagccaagactgcaccactgcactccagcctgggtgatagcacgagaccctgtctcaaaagaaaaaaagaaaagaataaagagagtatggaataaaatgctagatttgaagaggaaaaggacaggttggtagcaggactggctatataatttgtggggctcagtgcaaaatgaaaatagaagtccccttgttcaaaaattaagaagtttaaggtagcaacagcaaagcattaaaccaagcatgaggctcttctgagcatggggccctgtgtgacttcataggtcacacactcataaagctcaccctggtcagaagttgagatgtcagtaaaaaggaaaaggaatgatccattccctgtgatgttttcctacctctatgccatccttacctatgtactcatcaggtgtgaccatctctcaagggggcaccattgtgccagtgagctgaggcacagacactggctctagtctatggaggaaggagcatgagaaggaggttgcattctaccagcggcgggagagtaggatggagctgaaggctttctgaactgatctaggagagagagcatgaacttgggaactctgcaactttctagcagtgtagtaaagttatttaacctctctgaatcttattttttcattgccgtaaaatggtgatatctacctctcagggttactgtgtggattacagataatgtggaaaatgcctagcactgtggctggtatgcagtggaagctcaagatatattgtacatatggtcatttttgtaagtgcggagatacactgaggatgagtgaaaaagacttcaagtctcagatagggtggaggatctcagaatgcttgaagagccttgtaagaactggctgcctctcttgagtccctccttagttcctgagtgctttggaatcgtttaaaactcacaattgcatcttcttcccaaatagggtgaggagcaatctgtgggaagtcagtgcacagtagagttcagtcttccaacgctgaaaatttgccaactttcacccacactgtggagatgagaaagcagctgtgggcagacagtagagtaagctgtggggtctctggaacatgttacgcttacggatgttccattgttcccatgagattttgtactttgtctgttttatccaggtttgtttccataatatacgaaggagacagccaaaaccattttatgtagttttcctactttgttttgatttatttgttattatttacagtattatctccaataacaacaatggaatttcctttcctactaatctggcctgtttccattttgcctgtttattttaatttcctttttttggactgaaatctctacatgactctgatttgtttatttccttgcgtgtatgtgtcagcatcatttattagtgtgtccactcagaggaactttgttcattaattatgtaggttttgtttcctggttcctaatgggagggtattaagtgctctatgtttctaagtacttcacgatggttttggttatcagtttcttcatcactgctctctgcaagtagatgggcttactctccatggcttacagatggagcatgggaagccccagagcagagaagtaactcctctgcagatgatgattttcttaaatccgctgacccgtcacgcctgccactcgtatagatttcaatttccacttacttttatttgggtagtgggttaagtgagcataacacctgtgttttgcagacgtgattccttgaagacatttccatgaaaaccagcctgttgttaacgaatgagcaatatcgtcttgcattataagctgcttggggggtgtgtgatgaatgttagacttatcccttttttgtgaagaacttacagcccactaagtcaataaaaaagttaaaaggaagaggtaacctgacttttacatctgttacttgaatatataagatctgctgcctccttttcaatggattgtcatgatttactaaatgattgaattaatgattcataaaacatttatttagtacttactctgtgtgtgatactatctctagtctcaagatgcttataagactagaaggcgaaaatagaattgaaagcaaataaatataataaaatgttacaggtgacatgatagaagtttgtctagagtacatagaataacaaaggagggaggcctgtattctcttgggatggggattggagagaaggtgtcacaaacaaaggctataggcaccagatgtatctggggtccatagatactttcaaatggctgaaacagtggctgaggaggcagcagtgcatgcatgaggtgggagaagggaggtggagaaagccagacacaaagatccttggatgctgtgtgaaggaatttgggttttattctttaggaaaagttttaggtagatggaacatcagtaacagttttgctttttagaaaaattacaccaagaatagactcaaggagacttgaatggaggcaaggagactcttctgataatatggggctgagccaggcaagatatgatgagattctgagcaagccagtggtggatggaaagatgtcaaagaagtagaccttgtaaaattggtatcaatttttaaataatatcttacagtaactgttagcgaaaccaaggcccaagaaagtgcatagccagtgaatatcaaagggatcttcctctgccttcattgcagtttagaaacacaattattgtggcatttcagacactacgttgtaatacatcatattgttaatacttgtttacaatctttctgtcctgaggctctaagcttcttaaggttaacagccaaactactgaattatttgtgtatgcctagcatggagcctcatatacacaagtgcataatagatgtttgaagagtaaaactcttgacatcatagccagtgcttcttccacatggagcacttggcatgaaaatatgaaaacatcactcaggtttgcctgacagccacccatttccatcactccccctgagagcaccaaagccaagtgatgagcaggtataacaggcagatgatggcttgcactttgctttaaaatttgtatcagtttgccattatcagaatgcattcttacctcccaaagcctgcattaaaataccaataatgaatatttagaatataaaagtggccataaaagttgatgcctattatgatactgtctttaatggtctcactagtcagaagtcaagcatgataatttgcttcgatgtctcttttaatgttacccattgttttaacctggatcacactttattcttccacacagatccgtaatgcctcctgcctgcctctttcaagatggaggtgaaacctgtgggagaacctactcaagaggtgtctaaattcaaactttccaccaaggtagaaagcacgggacactggctggtggaagatcatgttcgaatatgggaagttttaaagacagaggaggtaagatgactctaaatgacacagttggtgaaatgttggatttgtttatacctgagaccataattcttcgtgtagccagcaccacaggccagcttggcaaatctttattcaggggctgtaggcacagccatgactggagaacaagtaagtcaggagcatgtcctttgcacattaatgactacacagtgattcaggccaaggaggctgcactgaaagccagcgcttaaaaaatgatgatctaaggctcatatgcatataatctgcactttagcctcaggtatcagcagtgtagctgtgggtatcccgctagctacattctttctcaaggctgcccttctgtgacttccctctctcaagcctattgttgttgaagtttcatttgacttatataaaatgctgatatttgtgtgcatatttgtggggggtgtgtgtgtgagagagagaaagagagagaggggacggggagagagagagagagagatgctattattctttcaatggaaattataaattaaagcttttatttttattatgcgtttgaggtaaaatacatattggcaagatattgaaaaccatttccatataggcatgaagaggtataaaaggaagattggaaaagagaatggagttattaaccagatcatggaaaggcctaatttccctgagcttgggttgtgaccatcttttcagctcagcaaataaaattaaagctagaggtttttatgtttttgttttttttggagacaggatcttgctcttctgtccaggctagagtgcagtggcacagtcatagcttactgctgcctggaactcctgggctcaagtgatcctcctgtctcaggctcccaagtaactaggactacaggtcacacaacaccacacctggataatttttaaattttttgtaaagatgagactctcgctatgttgcccaggctggtcttgaagtcctagcctcaagcaatcctcctgcctctgccttccaaagcactgggattacaggtgtgagtgactgtgcccagccccaaaagctagaggttttaatacatgggaaagagcatctcagagagaggtagcaaagcaacaactaagatagcatagaaacgtaatagggaaaacagagaacactttgtcaatggtattttggctaccagaaagaccagcagctgttttctgagaggcttacctgggtgatattcattatcttgggtagttgtctagggtctggtccttagcttacatgcttggaaattttattttctcatgtatccaacagaactttctggggcaaactcacatgaattaagtttatgcaactaatatataaaaagaaaatggcaattccttaattgataaagacaaatagaagagttttatcttctggaatactcaatttaaaatgtttagcacacattctccttgtaggcaaacctaatgggaaatcaaataatgctgagaaagttgattcctaaggatggaatcataacaagtggaaatatataaattccttgtttgacagcatgaggctaagtatattggtatggctctttggttccaagtaacagaaattgactaaattaaggagaatgagaaattgctggaggatgttgagaagcttacagaattggtgagaagtttggaggactaggcttggaaataagacaggaaccaagtcagtagaaactgctcagggtgccaatcctggcacaaattctaaactggtcccttcccctccatattctcatattctgctcaggatgcaaagctgtgggagagaggagctcattgccaagtttagttgcatgcctttcttttggttattctgtgaagagaaagaggaatcttccatgggaaattattataccaactcctcactacagttgtgtttaaaattcaaattcctaatattgacacattatgacaattccaatccaaggaagtaacctaacaactagttttgaacatgtaaaatccagcagaagcaaatacaagccttctctatagggatatacttgcacaacagacttttttttttttttaaagaaataaactccacaggtggtagatgaagtctttgtgtatcttacctaacaggtccaagataagatgagatgagtgttgtgctgagggcacaaaatttaaggaagcactcactcttaggtttatgccctgtacttgcacaaaattgagagtgagtgtatccttaaattttgcaccctaggcttgatgcttgtctcactccagtcctggccctgtcataaatctgaatttggtgtttatcatttttatgcatatttcagtatttatactacatgcatgtggatctatatattcaatatacagtattgatttacatcttgtaaattttatataagccttgtactgtacatctacttctacagcttgtttttttgtttctatttttatgctgacatatgtagtttcactttattcatgtttaactgctgtttatattattttaatatagtcaaatttatttcttcattctcttgttgattaacttttagttttctttcaatacaattggcagtataatacatttttcctcgtgaacatatgctagagttttttctagcatagacacctggaagtggcatgctgagttgtaaagtatgaatacctttagttttgctagatattactagatcagctctgaaatgaggccatgagtttgtatctctgttagcagcatatgaaagttcaaccattctatatcctcacctgttattggtattgacagacctttaaatattggccagtctgtttgttttgaaatgggaccttgttgtaacacaaatttccctgaattcttgtggcattgagcatctgttcacatggatattggccatttagttttctgtgaattatctgttcttatcctttgcttgtttcttttcattgggtcatttgtctttccttgttgatttctggaaactaatgttttgtttactaaacaatcctttttattgatttcatgcactaaaacaatattttcccactcctaaatttttgttttaaattttaatttggtaaaatttatgtcttcttttctccttatggtttgtgttttttctgctttaagaaattatttctgacctcatgatgataaagatactctcctgtgtttcctaaaagttctaaaagttctaaatgtttgcttttatttgcttagtatttatttcacaatctgaaatagggatatgtgttttttccatatggataattaattatctagtgtcacttttgaatgttattgtttcttcttcagtttataatgctatttttcatgtatcatgtttctatagatatcctgtctgtggatatgatactcatttaactattctagctctaaaaaaaagccccgagtatccagtagggaatgtttctctgctgagctattgatcttcaagattatcttggttgtttttggaaactgcattttccatatggatttaggatgagcttgttcagttctgaagatatgaagaaaaattaagcagaaacttgttgggaatttgatttggatttcagtaaatttgttgactgatttggagagtatcaacatttttatattcaatggctatcttgtcttctttttgactttaaaggttatgctttaatatttcatccttaatgtctcaccaatatttgatcccacattcttttgctgtaggattttgataactaaggctaaagaagttccttcaattcatttttttttttttgctaagtgcttattttttaacattatagtatttgatacctacaaaataatacacatgcaagttatggattataatattgtggaatcacaaatacttgtgagtccacaaccaacttaagaaatagtttgttgagtctatatgtgaactgtttcacctactatctctttgatttctttccctgcaaaggtacccatcttcctgaaagttgtgtttaatcatccttttgctttttaaaaagtctttactgcatatgtgtatcctcaaacaatactgttgagttatacacacacacacatgcacacacatatatacacctacatatgtatgtatatataaacacatatatatttatatgtatggtgtctttggtgactcacttcttttactcaacattatgtttataaaatttttaagattcagccacaaaaatatatatagtagtacttcattaattttcactattgtacaatatgccattgtgtggttatatcatgattaattattcatcgttatgtggatgaacatttaagttatttatagttttttgccatgatgaacaatgctgatatgaacatagtatacatgtattttttttttttttttagttttcttatatatttttttaatatactttaagttctgggatacatgtacagaacatgcaggtttgttatacaggtatacatatgccatggtggttagctgcacccatcaacctgtcacctacattaggtagttctcctaatgttatctctccccttgccccccatcccccaacaggcctaggtgtgtgatgttcccctccctgtgtccatgtgttctcaagttctcattgttcaactcccacttatgagtgagaacatgcagtgtttggttttctgttcctgtgttagtttgctgagaatgatggtttccagcttcatccatgtccctgcaaaggacatgaactcatcttttttttatggctgcattgtattccatggtgtatatgtgccacattttctttttccagtctaccattgatgggcatttgggttggttccaagtctttgctattgtgaatagtgctgcaataaacatacatgtgcatgtgtctttatagtataatgatttatgatcctttgggtatataccaagtaatgggattgctgggtcaaatggtatttctggttctagatccttgaggaatcaccacgctgtcttccacaatggttgaactaatttacacttccaccaacagtgtaaaagcattcctgtttctccacatcctctccagaatctgttgtttcctgactttttattgatggccattctaactggtgtgagatggtatctcattgtatacaatgacccctgatgatgagcgttttttcatgttttttggccgcataaatgtcttcttttgagaagtatctgtttatgtcctttgctcaatttttgatggggttgtttgtttttccttgtaaatttatttaggttccttgtagattctggatattagacctttgtcagacggagagattgcaaaactttcctcccactttgtaggttgcctgttcactctgatgatagattcttttgctgtgcagaagctctacatttattgatttgcatatgttgaaccagtcttgcattccagggatgaagccaacttgattgtgatggataagctttttgatgtgttgctggattcggtttgccagtattttattgaggattttcacatcgatgttcatcagggatattggcctgaagttttctttttttgttgtgtctctgccaggtgttggtatcagggtaaggctggcctcataaaatgagttagggaggagtccctctttttctatgatttggaatagtttcagaaggaatggtgccagctcctctttgtacctctggtggaattaggttgtgaatccatctggatctgggctttttttgattggtaggttattaattactgcctcaatttcagaacttgttattggtctattcaaggagttgacttcttctgatttagtcttgagagggtgtatgtgtccaggaatttcttctagattttctagtttatttgtgtagaggtttttataatattctctgatggtagtttgtatttctgtgggatcagtggtgatatcccctttatcattttttattgtgtctatttgatccttttctcttttcgtctttattagtctggctagtggtctatctattttgctaatcttttcaaaaaaccagctcctggattcattgagtttttgtgtctctaactccttgagttctgctctgatcttagttatttcttgtcttctactagtcttctacgagcttttgaatttgtttgcttctctagttctttttttttttttttttttttttttttttgagacggagtctcgctctgttgccccagctggagtgcagtggcacgatctcggctcactgcaagctctgcctcctgggttcacaccattctcctgcctcagcctctggagtagctgggactacaggtgcccgccaccacgtccagctaattttttatatttttagtagagttgggggtctcactgtgttagccaggatggtctcgatctcctgacctcgtgatctgcctgcctcggcctgccaaagtgctgggattacaggcgtgagccaccttttatttgtaatgttagtatgttgattttagatctttcctgctttctcccgtgggcatttagtgctataaatttccctctaaacactgctttaaatgtgtcccagagattctgatacattgtatctttgttctcactggtttcaaaggacttatttatttctgcctttatttggttatttacccagtaatcattcagaagcaagttgttcagtttccatgtagttgtgtggtttttagtgagtttcttaatcttgagttctaatttgattgcactgtggtctaagagaccatttgttatgatttcaattcttttacatttgctgaggaatgttttacttccaattatgtcgtcaattttagaataagtgctatgtggtactgagaagaatgtatattttgtttatttggggtggagagttctgcagatgtctattaggtccgcttggtccagagctgagttcaagtcctgaatatccttgttaattttctgtctcattgatctgtctaatactgacagtgggttgttaaatctcccactgttattttgtgggagtctaagtctcattgtaggtctctaagaacttgctttatgaatctgggtgctcctacattggttgcatatatatttaggatagccatctcttcttgttgcatcgatccctttaccattatgtaatgcccttctttgtgttttttgttctttgttggtttaaagtctgttttattagagactaggattgcaacccctatgtgtgtctttacatgtgagatgggtctcctgaatacagcacacctataggtcctgactctttatccaattttccagtctgtgtcttttaattggggcatttagtccatttacatttaaggttaatattgttatgtgtcaatttgatcctgtcgtcatgatgctagctggtaattttgcacgttagttgatgcggtttctccatagtgtcgttggtctttatattttggtatgtttttgcagtggctggtacaggtttttcctttccatatttactgcttccttcaggagctcttgtaagggaggcctggtggtgacaaaatccctcagcatttgcttgtctgtaaaggactgtatttctctttcactgatgagcttagtttggctggatatgaaattctgggttgaaaattcttttccttaaaaatgttgaatattggtccccactctcttctggattctagtgtttctacagagagatccactgtcagtctgatgggcttccctttgagggtaacctgacctttctctctggctgcccttaaatttttttcttcatttcaaccttggtgaatctgatgattatgtgtcttggggttgctcctcttgaggagcatcttagtggtgctctctgcatttcctgaatttgaatgttggcctgtcttgctaggttggggaaattctcctggataatatcctgaagtgtgttttccaacttggttccattctccccatcgctttcaggtacaccaatcaaacgtaggtttggtcttttcacatagttccatattctttggaggctttgttcattccttttcattcttttttctctaatcttgtcttcactctttatttcattaagttgatcttcaatctctaatatcctttcttctgctttattgattcagctattgatacttgtgtatgcttcatgaaattcttgtgctgtgtttttcagctctatcaggtcatttatgttcttctctaaattggttattctagttagcagttcctgtaacctttttgaaggttcttagcttccttgcattgggttagaacatgcccctttagctggaggaatttgttattacccaccttctgaagtctacttctgtcaattcattaaactcattctccatccagttttgttcccttgctggtgaggagttgtgatcttttggaggagaagaggcattctggtttttggaatttcagcatttttgggctggcttctccttatcttcttggatttatctacctttgatctttgatgctgatgacctttggatggggtttttgcgtgggcatcctatttgttgatgttgatgttatttctttctctttgttaattttccttctaacagtcaggtccctcttctgcaggtcttctggagtttgctggaggttcactctagactctgtttgtctgggtatcaccagtggaggctgcaaaatagcaaaagttgctgcctgctccttgctctggaagcttcgtcccagaggggcacctgccaggtgccagccagagctctcctgtatgaggtgtctgtcatcccctgctgggaggtgtctcccagttaggaggcatgggggacagggacccacttgaggaggcaggctgtcccttagtggagcttgagcattgtgctgggagatctgctgctctcttcagagctggcaggcaggaatgtttaagtctgccgaagctgcacccacagctgccccttcccccaggtgctctgtcccagggagatgggagttttttctatacacccctgactggggctgctgcctttctttcagagataccctgcccagagaggaggaatctggagaggcagtctggctacagcagctttcctgagttgcggtggtttccacccagtccgaacttcccaatggctttgtttacactgcgaggggaaaagtgcctattcaagcctcagtaatggtggatgcaagctcgagggtcccaggttgacttcagactgctgtgctggcagtgataatttcaagccagtggatcttagcttgctggggtctgtaggggtttgacctgctgagtgagaccacttggcttcctggcttcagcttgctttaaaggggagtgaatggttctgtctcgctggggttccaggcaccactagggtatgaaaaaaaactcctgcagctagctcagtgtctgcccaaatggctgcccagttttgtgcttgaaacccagggccctggtggtgtaggcacctaagggaatttcctggcctgtgggttgcaaaaactgtgggaaaagcttagtatctgggccagagagcaccatccctcatggcacagtccttcacagctttccttggctaggggagggagttccctgaccccttgcacttcccaggtgagctgacgccccaccctgcttatgcttgctctccatgggctgtattcactgcctgaccagtcccagtgagatgaactgggtacctcagttggaaatgcagaactcacccaccttctgcattggtcttgttgggagctgcagactggagctgttcctattcggccatcttgccagatccccacatactatacatatcttatttttgcccatatgtaagagtttttccaggttaatagctattagatgaattttgagttgatatgtgcaagttctcttcttcaagttattgccaaactgttttccaaaatggtggtaccaatttatgctctcatccacagtgcataagagtttcccctattccctatccttgtcaattcttggaattgtcagatttcttaattttttttttttgagatggagtctcactctgtcaccaggctggagtgcagtggcacaatttgggctcactgcaacttccgcctcctggtttcaagcgattctcctgcctcagcctcctgagtagctgggactacaggtgcacgccaccacgcccagctaatttttgtatttttagtacagacggggtctcaccatgttggccaggatggtctcgatctcttgaccttgtgatccgcccacctcggcctcccaaagtgctgggattacaggtgtgagccactgtgcccagcccagatttcttaattttttaaatctagatgatataaaatagaatctcattctttgctcatcaattctttatgcatctcagctcgagaacacttttttttttcctttgtacttattctgagggtctaacagtaacacatctctttctctctttctctctctctctctctctctctctctctctttcccctttcctctctttggccttaagatgtctttattttgtgtgcttctcagagtgatagtttagatgactatagaattatagttctttgagtacattggaaattttccattgtcctctgccttccattgcactggaaggggagctagcataaagtttaacttgtattattttgaatgtaacatcttttctctataactgtttagatcatctctacattttttgctgtcctgaagtttcattcttctgtttttccatgtgggtttccttttatttaacattttggggtacgagggcttctcaaatagatgaattgatgtctttcatccgtctggaaatatctccaatttttttcttttgaaattttacctcattctccttttgtaactctagcaagatttatgtttgcttctctcactctctgcttatgtcccttaacctctcttttagagttactatctttttcctctctgagttgcattcttattaatcttaggtctgccttccaattccgtaattctctcttcagctttaatctgtcctttaactcaatcattgatttttaaatttcacttattgtattatttacttctagaagttttgttttgttctttaaaaatcttctagtcattttttcaatgtcttgcttcctatttatatttttattttttcaagacatatttgtcaagaactgtgaaggctatgagattttaattttttaaaatccacagttttgtggatgttgaaagaagacatgagactcttggctaagagcaaaagactttattactcacagcaagagcagcagccagagtgtcaacatgtttgttttggttttctatgttccaattcctagaaatgggcctagatagatacctgcacaggaagggaacattgaccttgggaaacttgccattttatagtaggtaataaacaagctggcattttgtttaagggggaagtattagctcatctctcaagttttcttgctacaagcccaatcctgaaaaataatctgggtaaagatcagccagggccttgaatttttggcatatatagcaagacatgtaggaacaagagagatccatgaagtagtgttgcctaacaatattaaatatagtgattttgtattctgagtgtggtaattctaaaaactgtgggtctcagtgtactatctgttgtttcttttggctcttgaacatggtgttttgtttctttgtgagttttgtgatttttgacagtgggttcattttttttttttcttggaaagaaggaaattttctccagagagaatttgcatttgtttctgggagcactaccaacgggaaactacttgaaaataaattcttatcttgatgtttttcagaccacttaatgtgtctacaggctagaaatctacagatgggcgtgcttgtggtagtaaattctaaggagaaaatgactccccctctctacccctcctcagcatcatatataaagatagtcaactttccttgtattgtcacagaagatatagtattactagctcaccttgatgctgagggaatcacattttagggtctcagttttatgcagtggggatttcctgttagattctctcccataagctaaccttgggctttgtatattgttccctacttgctttaaggtaacaagtcctatgttggttagagtaacattaatgctgtaacaaatacagtataaaatttaagtagcttaacataataaaagtttatttctcaatcatataatagtccaatttaggtgtttctggtgggagtgccccttttctccatgtgataatttagggaccaaggctactttcttcttgaagctccaccatcctctgggacctgggaatcttttgtattcacctggcaattcacaaaaaaagaggttgaagaagacacacccaattcttaactctctttgaccagacatgcattgtattagtttaccttctatgactgagaattagtcctgttgttccatacagatgtgagggatgtgtgatggggagatgtaatctctggctgagctgctacttaccagtgatgactcaatactatggaaagtgaaatacaaattgaattttggtgggcagttaagtgtcacagaaaacaaagtttaaatttacctggtttggccaatgacgtctgaatggaagctgacttcaatgcctatctgtgggttctgctttcatttaccttttggcttttaagagttcttaattttttgccagcctgtcatgtattaaaaaagatattttagttttattttatcaagtttttgtttgtttgtttgtttgttttagttatttgtagtgggagagtgaactagggtatttagtccactgtactgctggaactgagtcctacacactcctgtgagttatttagaaatgtgatcttaaaagttgaaagtctatttttttaaacttaccttttgaaaattacttcacttggtcagaaagtggcatctagataatgttgaatttctattttttggccatatttagttaattttttggccatatttagttaagtacctgcttgcacatgaatattcgtaactgacatcttgcaatcatttaaaagttttatgtagtcacaaatcagtttgtcaagtatatttaaaatgaaaatattattttcattttcaatgtagtgattaactgtaactattctatgcctttaaaattcaaatatttaaaatttaaatgataaataatacctatatgtagtagaaaataatgaaatctttattaaagggttaagtatgacaaatatctttatataatttcagtacctttttaaaaaaaaagagcaaggaagcaatgggagaattggacatgttttgtggtgatgtgttcaattttttgattggtgattacatgggtgtacgtatttgtcaaaactcattcaactatacatttaaaatggacatattttattatatgtaaatgatacctcaacaaagttgatcttaaaaaacggacaatgggatgagggaatagaattaaataaataaatcagtcattgccatacagtgtgctgtaataagtgtccacaggtatttcgagagcttagagcatgtaatccagcatgagtatgggcactcataggtgtgcatgtcaaggaaaggaagcttctcactgagctgatagttgagttcattctttttttttttttttttgacacagagttttgctcttgttgcccaggctggagtgcaatggcgcaatctcggctcactgcaacctctgcctcccgggttcaagcgagtctcctgcctcagtctcctgagtagctgggattacaggtgcctgccaccatgcccagctagttttttgtatttttagtaaagacggggtttcaccatgttggccaggctggtcttgaactcctgccctcaggtgaaccacccgtctcggcctcccaaagtgctgggaataaaggtgtgagccactgcgcctggcctgagttcatttttttttttttctttgagatggagtcttgctctgtcgtccaggctggagtgcaactttgacctccctggttcgcttaaaggaaaggtagaaactagcctggcaaatggaatttttgaaggggaattggatcaaatatttctggatcagggaaaactgtaaaggggagtgttagagagaatgtcctaccatttagagcatctgtagcagaagaggaatggcaagagatgaagccaagaggaaacaaataatgaaagtcttcacgtctcttacttagaaacttaggaagtatcctgtgggcactgtgcagtcaatgaaaggtttttggcaggctagtgacatgttcagatttgtttttagaaatgctagtctgtcagacatgtttaggatggccgaaaatacttcaaaacctctctagcccagattgctgtctctcttctctgtccacactatgctagccagtgctcaagtagtgattatttggggttgttctttttttcatgatagtaattcttcctctccaactagactgtctgtccttcagaccaggcctcttagtcttcttctttttaaaaaatttatattcccatattgataggtcacccccttagtcttaattctacttcacttatgactcccaaagcactggtactactagacacaggttgaaataaatatttgatgattgactgatgaattattttcattatttaatggtaataccctgtttctctaaattgtaacatcaagcagaatgttgtcatctttgggtactaaggtgattcatttgactcaccattggataacacttagttgggtggtttgtttgtttttttttttttgtattgctgattgaatttgcacggagtcatccactatgcactggacttatctatgttcaatgttttacaagaataccacaacgatatgcaatgttctctatggctatcgaacagagatgttctctacgtgaaattaaactggcgaatgtctgtatggagactggacatatgacctcttctctatccagctcaggaatggggcttcacattgtaaaatcacattcttggaggaggaaatagtaagtgttcatcatgcatgctttggagattaaatcatacacatctgagagacaggaagagagaagtttttaaaaactggatggcaatttaggcaagcagtgggagtgtattgtattaaactgtgaaaagccagctatttgctgaattgtggtttgatgacagagctagggtccttctttatgattctgaatgaatttctatttcactctgccacaaattttcatatgaggcaaagggatagaaatttactttctaggaagttattaatatataaaaatgctttgatatatgaatctctgagatgggtaaaatagacatatcagtagtgagaaatggaatattgagactgaataatattctgttgggtttacaagaaaaagaaaatatcatttattgagcatctattctgtgtcaggaactgcacttggtgctttcatatttattaatatatttgtcacagccataggtacattttcattttactcataaggattatgaagattagaggttaaggcacatgctcaaatatacatagctgtttggtggcagagtaagattgaaattcatttgtctctcatttgtctttgttctataatctcctcatgaagcaaactaccaaaattgttaaatcactctaattttacatttagttttcttgtccagaccataaccattcctggccagggcatcaacttcagctcaataactggtaccaatcttgctctgttagaccttggctctgcaatgcccatgtgaacaaataccagtgtgcccattgagtcataatcttcttccattcctcaaagtgctggctcagttggtgtggctaggcttctatctcagttctcctatatatcatctgtcttagccagttggactgccacaatgaaatagcacagactgggtggcttataaacgatagaattttttttttttttttgagacggagtctcgctctgtcgcccaggctggagtgcagtggcacgatcttggttcactgcaagctctgcctcctgggttcacaccattctcctgcctcagcctccagagtagctgggactacgggcgcctgccaccatgcctggctaactttatatatattttagtagagacggggtttcaccgtgttagccaggatggtctcgatctcctgaccttgtgatccacccgccttggcctcccaaagtgctaggattacaggcatgagccaccgtgcccagccaacaatagaaatttctctctcacagctctggaggctgggagtctgacatcaggatgccagcatgtttgggttctggtgaggttccttctctgagttacagatggtgtcttctcaatgggtcctcatgtggcagaaaaagttggagagctctttggggtcccttttataagggcatgaatcccattcatgaagactctaccctcatgaccttattgcctccccaaagctctgcctcctaatatcatcacactgagggggttctgttttcaacctaacaaagtttgggaacacaaacattcagtccatagtaggacccagtttctcagagagactgtacctatttaaatggtgcccttaactccatcctatttaaatagaacttagaactctgttaggctccatgtagctctgtcttctgcataattgagctctgttccacttaccccaagctattaattggggtctaattgtaaacagtctgtttggaacctggctatttttacccaatccctgaactcctgttgctttcttggatatgaaagcttgccagaatcacatcagagttttcctatgcccttgttttgtgttccttctgagcttggttagtcacgtgcagccataagagatacaagagaggctcaggaaaaaacaaaggttattacacttgcaggtcctagagagaggagatattctgcatgggaagacacgattgtggtcatgaggcagaagacaagagtgagtgggaagcttagattacttctgtattggggtttttgaggaaaaggcatgccacggcagggagaatgtttgggattggttagtttgaacacttttggtgggttttctgctataggagtagtttctagttgcctagtacctggccctgggatgattaaggcagataaatactgtctcctgaagtatccaggccaaacagaggagataaggcttttgcttggttaatttgcacatcaaaggtatgctctctgacttttgttatctttaagaattagctagcccagggaaggcagtctctcccagttgtaaagtttttaaagacatcaaaacatcataatatacagaaaattaaaaaatatttacaatacagtccttgggacacatcttaccaaacagcctgctactaccatgggacacatacctctagtcagggaagtctctccagctccagtttgtcaactgtcttattcttttccattggcccttgttgccagtctcaagattccttgtgattaagaccacctgaatatgacatgatgcatttaataagtttcttagtctaaactaaaggtggatactgaggatattaaagctttcattatggttaaatttcactgttggtattagaatgtgctcaagtatcacctcttccaggaagacatccttgatttttctggtcagggttagtgaccctcctgtgtggtactgtaatatctctgcatatctatcttataagactcatcacattaatggtacacacatacctcgtggatacctggtttgtttccagaccacctcagtaaagcaaatattgcacaaagtaagtcacataaatttttttttgttttcccagtgcatataaaagtgatgtctacattatactgtaggctattaagtgtgcaagagcattatatctaaaaagtacatatcttaatttaaaaatactgtatttctaaaaaatgctaatgatcatttgagccttcagcaagtcataatctttttgctggcagagggtcttgcctcaatgttgatggctgctggctgatcagagtggttggctgctgaaggttgcagtggctgtgtttcttaaaataagacattaatgaagtttgtcatatccattgactcttcttttcttgaaagatttctctgtagcatgcaatgttgtttgatagcattttactcacagtagaacttctttcaaaaccaaagtcaggctgagcatggtggctcccaccagtcatcccagcgctgtgggaggctgaggtaggaggattgcttgaggccaggaatttgagactagcctgggccatatagcaagatccagtctctgcaaaaaaaaaaaaaaaaaaaaaaaaacaaacctgggtgtggtggtgtgtgcatgtagtcccagctactcaggaggctgaggtgagaggcttgcatgaacctcagcaatcctcactcaggaggctgtagtgaggtatgattgcaccactgcactccagcctgagcaagagagcaagaccctatctttaaaaaacaaacaaaaaatgaagtcagtgctcccaaaccctgctgctactttatcaactaagtttatgtaatatctaaatcctttgttgtcatttcaccacattcgcagcccattcctcaggagtagattccatctcatctcaagaaaccacagtctttgcttatctataagaagtcactcgttgtccattcaagcttactgtgagattgcagcaatttagcctatctttgggctccacttctaattctagttctcttgctatttccattgcactggcagttgcttcatccattgaagtcttgcacccctcaaagtcattcatgagggttgaaatcaacctcttttaaacttctgttaatgttgatattttgaccttctctcatgaattatgaatgttcttaatgacatctagaatggtgaatcctttccaaaagattttcaatttactttcctagatccatcagaggaatcattatctatggcagctatagccttatgaaatatatttcttaactaatcaaacttgaaagacaaaattactctctgacctatgaaatgatattgtgttatgaaatgctgtgaaatggatattgtgttagcaggcatgaaaacaacaatctccttgcacatctctggctcttgggtgaccagccacattgtcaatgagcagtaatattttgaaaggaatatctttttttctaagcagtagtctcaatagtgggcttaaaatattcagtaagctgtatatgctgtaaatagatgtgctatcatctaggctttattgctccatttatagagcacagccagaatagatgtagcataattcctaagggctctaggattttcagaatggtgagtatttgctttaacttaaagtaagcagctgcattagcccctagcaagagaatcaacctcttctttgaagctttgaagtcaggcattgacttttcctctctagctatgatagtccaaaacggcatcttcttccaatataagactattttgtctacattgaaaatctgttgtttagtgtagacaccttcatcaatgatcttaactagatcttctggataactttctcttgctgtagcttctgtatcagcatttactgcttcaccttgcacttttaagttatggagatgtcttcttctcttaaacatcatgaaccaaccgctgcaagcttcaaacttttcttctgtagcttcttcacctctcacagccttcatagaactgaagaaagttagggctttgctctggattaggccttgttaaagggaattttgtggctagtttgatcttctgccagaccactaaaactttctgcatatcagcattaaggctgttttgctttatcattcatctactcactggagtagcattttaaatttccttcaagaacttttcctttgcattaacagcttggctaaccatttggcacaagaggcttagcttttggcctgtctcagcttttgacatgccttcctcactaagtgtaatcatttctaggttttgatttaaagcaagagatgtgtaactcttcctttcatttgaacacttagaggccattgtagggttattaattggcctgatttcaatattgtcatgtctcagggaatagaaaggcatgaggagagggagagagacaagggaacagccagtcagtggagcagtgagaacacacacagctttgatcaatttttttccagcctacatcatgctttgaatacataatagtaatttaaaagtttgaaatattgcgagaaaattaccaaaatgtccagagacatgaagtgatcacatactgttgaaaaaatggcaagacctgcttgatgcggggttgccacaaaccttcaatttattatgcagccaacaaacatatgaaaagaagctcatcatcactggtcattagagaaatacaaatcaaaaccacaatgagatgccttctcacaccagttagaatgaccatcattaaaaagtcaagaaacaacagatgctggagagggtgtggagaaataggaatgcttttacactgttggtgggagtgtaaattagttcaaccattgtggaagacagtatggcaattcctcaaggatctagaaccagaaatgccatttgacccagaaatcccattactgggtataaacccaaaggatcataaatcattctactataaagatacatgcacatgtatgtttatcatggcactgttcacaatagcaaagacctgaaaccaatccaaatgcccatcaatgatagactggataaagaaaatgtgtcacacatataccatggaatactatgcagccataaaaaagatgagttcatgtcctttgcagggacatggatgaagctggaagccatcattctaagcaaactaacacaagaacagaaaaccagacaccacatattctcactcataagtgggagctgaacaatgagaacacagggacacagggaggggaacatcacacactgggacctgtcaggacatggggactaggggagaaatagcattaggagaaatacctaatgtagatgacgggttgatgggtgcagtaaaccactatggcacatgtatacctatataacaaacctgcacgttctgcacatgtaccccagaacttaaaatatatatatataaaaaaacacagtatctactaagtgctataaagtgaagcacaagaaaacaagctgcctatacttttatatttacatattgttgtctctcaaactaaaatgtaagctcctcaagggcagggcctctgtcataatccatctttatgtgcccaatattattcacagtatctggcacatagtgagaacctaacaagtacttattaaatagagaaaatgtgtagagggactaagaggttggtctccagagacagactggccatgatgtgcaaattccttaatctgtatttccgtttctttatctataaagtgggtacactaataggattgttatgagaattaattgagttataatatgtaaattgcttagaatatagcttggtacataataagcaatagatgtagacttttattgttattgagtgaatcagtggggaaagagtacaaaatgttacaccacatgggcccaccaattgtacaatagttgcttttgactcctgctgcctgaattcaagatttccctcacattctggaaagccccacactccaggatcctttgtttttaagtgcctgcagaatttgtactgggtgacacagttgtttggctccaatgagactaccctgctaatatttgtaaagggtgacctttcacaaaggaagacaattggcctgaactaaatagcattgtgttgagatacaaaaattatttgcaggggagaccagatatgggtgtattattaccacaacaccaggacttcagtccagggttctcctgctcaccacacagaaagccaatcactgagataatgagcattgccagggaagaagggtttgagtgcttcagccaaggagatgagagaccagtctcaaatctgtctcctcaactgcctaaaattaggggctcatgtggcagggaagaaatgtaaccatgtatgggaaaacaggaatcagggaggagtaaggaagaggaactgatcaataggaagtagatggtcagtgggcagttattatgggtgaggggtctggcatcccattgtccagatgtggtgatctggtaagtttcagttccttgatactatctgggagccctaatggtttcctgagaaaggaactcagataatacaaatataagtttttcaagttttaatactgagagggtcaatttctatatttattcaaaagaaaccataaacatcacttctatgggacaattgggctggttccagtcctgatctttctatttatcagttcctcaatcatggagaatatggttgtcgatctttcgggctgcttcatgctaaaaagggggcattgtgagcagctccataccatgggtaaccacgtggccacccaggaatcaaacgttaatttaataccatagttttcttctgtgatacaatctttatgtctccaatccactacttccaccaaagacaaatcatagcaggactaacctacctgaaaaataagcatcagtcccactatacttggcctgattacccatataaagtgcagcaagaatcattgtccatataggctcttctacattggctttgctggaacctctcacaaggaatcagattcaacctccaaaggcctctcaagcctagccaaggatccatctgtgtctacagatatttacatgaattgggtgaactcctctctttccaaggccccaaaagaacttgtggttcctgggcctgccaggaaggtgactctctacttaccacaggccaggaaccctgcaaaggaactgcatagacaaggtatgaggcatctttctaaggggttctcattggctctataaaatcaatgtgaattcctcaaagctgtgtgctcatatcccaaaacatgccattttagtccaagtcctagaaaataaccagtgcctccaattgtttccaaatataagagaaaacagattcttactgatcttgcaaacaaccacattgcaatgaattaagaacattcacaaagtttctgaattctggataaatctggcagagagggagaaatatgcctcatttctgtatactcaattgttaaaggctataaacagctcaaaagaaaaaaattctgaagactctgagaaacaaaacaaaaagaatcagtaatgtttcaaacaaaaaagagccatgaaaattatttcaatcctcctgtagttcaatccatgcaatcagctcttgttctgctttatattaggttagcagtctttatgaacacatcagcctttcaattagtgttctggaagttttctctctggtccaatggcacaatctccaaagttatcagaaacctgcaatcaggagtccttttcatgaactctcccaaggaagccctgggttgtagctgattataagctgctttttgagaagaatcaaagcaaaacaacaattgtggatgataaaaatcttaggatagctatagtcaaagacacaattgacaagaaagtttgattatttctgtggcatccaacaatttaacataaaaatcataatttttactaataacatattgagacatatcagaatttcaggaatctcatacaatcctagaacatgtctatataaatataacccaaagaaataatgctaaatgatgagttaatgggtgcagcacaccaacatggcacatgtatacatatgtaacaaacctgcacgttgtgcatatgtaccctaaaacttaaagtataataataataaaattaaaaaaaaaaaagaaagttaaacaccatcttggccaggtgtggtggctcacacctgtaatcccagcactttggtaggccgaggcgggcggatcatgaggtcaggagttcgagaccagcctggctaacatggttaccactagaatcttcaaaccagtacaacacttgtacatactttgttttcaagtacacacatgaaggcccaacaatgataaggtttgggatcaaaaatcactagaatgtctcactttttttttttactactacttaattcaagtgactgtcacttaatatgaataatggtaaacacagctaaagtaatttgagagaaactccagtcaatataattttctaaaggacaaggtcaatctttcctgaacattaaaactttgtacccatatcaagtttttcctcattttctaaaggaaaagatctgaaaccaactcaaattattgactaaattgaattaccttggaaataaacaccatttaaacatatccactcccatctacttttccaaataacaaaatattgtactatttctgttcagaacttataaaagtaagtcttttaattttgtccaagagctttataaactcttatagatcattaaaggaaagcataaccaatgctaatgatcctatagatcattagaggagagcaaaaccaatccaagtttaaaaggctggtgtgctctatcatttttttttttgaggcttgacaaaggtagcttaggaattttagatagatagagcaaatgatgaatgttggaaaaacatgggaaaccaaatggctatccatagaaccaaatgcaagcttttcattaggaactgaaaactcatggctgggtatagtggctcacccctgtaatcctagcactttggaaagccaaggtgggaggattgcttgagaccaggagtttgagaccagcctgggcaatataatgagaacttgtgtctactaaaaattaaaaaaaaaattagccagatgtggtagcatgcatttatagtcccagctactcgggaggctgcagtgggaagatagcttgagcccaggagtttgaagttgcagtgagctatgatcatggcattgccctccagtctattcagcctgggcagcagagcaagaccctgtctcaaaaaaaaaaaaaaaaaagaaactaaagaacatcaatgtatatataagtaatatgtatatataagtaaaacccaaaggagaacaaacagcaaataaatgaaaattaaaagcaaaaacagataaataggaagccccaaatttttctcttactcagataaccttggaggctacagtgttacccacagcctaaaatacaaaagcacgtgacggatattttgctcctgatatgcaaatgaatgttcttaagtccaccaacgcccctatacattttgtgcaattaagaaattcacttcagggatgtgaccagttaagtactttagtgctagtactatctatgcagaatagaaaatatagtgtgaaacaaatcagtgcaagcatttagtgaaatttggctccatgctaaatctggcttcgtgctcaacaatattaaaaaagaattgctggccgggtatggtggctcacacctgtaatcccagcactttgtgaggccgaggtgggcagatcacctgaggtcagaagttggagaccagcctggccaacatagtgaaaccccatctctactaaaaatacaaaaattagctgggtgtggtggtgtacacctggaatcccagctactcaggaggccaaggcaggagaatcgcttgaacccaggaggcagaagttgcagtgagctgagacagtgccactgcactgcagcctggatggcagagtgagactccgtctcaaagaaaaaaaaaattgcccaactgccatgtatttctttaaaatatttcttgttttactttatcaagactaagagctttaactatgagcaatgttaattagcccaatatctcaaattttctctcaggttttaaagaatattttactgtctaaacttccgtcttctctgtatgtgcatgaaggtagacacacagagaaacagaaaaaaaaaaaactacatatgacttacacagaacaacagaaggaccatgcatggactttctgttttgtcttaaattctctttatttttaaatagccagttattttattttaggacaaaaatttaccgttccaagattctttctcatacaaaattcttttttactttataaccttttttaaaaaaccgaaaatacatcttcatatccataactttcttcacatctctctcccctacttaccagttctattctaccttatttcataaataaccttttcaagcccataatttgaactaacctttagataactttttttttttttttttttttttggagacagggcctttgctctgttgtgcagtctgaagtgcagtggtgtgatcacagctcactgcagccttgacctcctggactcaagcaatcctcccaacttagcctcccgagtagctgggactacaggcatgtgccaccacacctggctaattaggaaaaaaaaaattgtagagatgaggtcttactatggtgcccaggctggtctcaaacccatgggttcaacttatcctcctgccttggcctcccaaagtgctgggattataggcatgagccagccagtaacttctgaattaaacaaaattattctttttctcagcaattttatatacggaattacatattacatattaactacaattcttattcttagtatccttaagttttagtgaaaacctaggaagcaagaatcctgaactgtcatataagatattagcattttatagataaggaccattccacaatttttggaaatatgtttccctgtatcataaccttttcttaattgggaattacctagacatctaatgaacatcaaaaatgattttaagattttaaattacatcatgccatttctatttcattcagttttttcatttttaacagttttacctagattacttatgagaactgagatattagacaaagctagttgtcatttccttgttaacaattttgtaacctgtgaatagcagtaaggtccttaaagttaactacatgggtattttcaccaatactcagaagactcagctatattcattaaaccaacaacattaaattagtcttatttggcaaaaattgcacaaagatcattttgttttggctgagtttatagctttataatcttctgtgccaaaccctgacacctcaaaatatctacagagacaaatacaaaacccagacaaaaatgtatgctgacaattccaaagtcacatctacttttatcttaccaataattttaaagctagattgcttattaaagatttacataagtcacatgaacttgaaacatgcttggatagatttaattatgagctttcttttatttataagccaatttggtagacacaacatataacataataaatgttacacaatacataaacatgtaaacatgatacacaaacataaagctccaatagcttttactttggaactctgtagccatgagatagtaatacaaactcaccagtttacaaacacgttcacgtggctacactttgtttaccctgataggtaatctaatgaaggctgagacccaaaattttgggtaaggtcgtttccatggcagtttgatttttaaaggccaaacctcctcatactccaaagaacactgaggtcaaacagcaccataaaacatcatgtattaaccaggcccgacccagcttagaacagcagcataaaagtctggatacatgaaattccatcccactttttctttaaacatcaaaatgaggcccatggaaaggccacacttctctagattgcaaagaatattggggcaaaatagtattacaaaagatcagtttataaaattctgatttcccatgactttattaacacacatatgtagacaatcatcaaaacaccatccaactgctgcagcaacaagccccaagcatgtccagactgaaacagtccaggtgcttttctctctcaattggttgggcttgtttaacctgcaaaaggaaactccttcagaattcccctaattgagaggagcagatcctgctgtctgttacccacgaaagacatcatctgtccagatgcagatgacaaatttcaaaggctgttcttcctaggtgatcaggaatgaagttggagccagcagtgatagtaccagagagacagagagagagagactgaaacccatctctggccaaaaaaggggttaggcagctgcctaggagggcttctgaaactcctggcccatgcattcccaataagggaaccaaaatctgttaccaaaacaccaggggttcagtctaggtcatgctgctcaccacacagaaagccaattactgaaatattgccagggaagaaggctttaattgggtgcttcgcttgaggggagaggagaccagtctcaaatccgtctcctcaactaaaattaggggtttatgtggcaaggaagaaatgtaaccatatgtgggaaaacaggaattagggagggaaaaggagtagttgggcaacaggaaataggaagtcaggcgatcatgacgggtgaggggtgtggcatctcattgtccagatgtgttgatctggtaagtttcagttccttgatactttctgggaggtcttatggttggtttcctgagaaaggaacccagatcagacaaactttttcaaattttaagcctggaagcttcaattctatgcttagtcaaaagaaaccataaagatcagttctatgagacaattgggctggtttcagtgttagaaccactcatctctactccctccctcccctgtggatgaggtggtaccatactgcagtaagcattgtgcttctcagaggaagtgttcctgaacccaagtggaaggctgggttataaaccttaccttatcctggctgctcagctgatggttatttgaatgggaaaaggcaaaacttctccaagaggataaaatgagataggacttatttctagagtgcttggtcctgtaaaaatctactggacatttgcagccaatttagccctctctgtttggctccgaggcctagaatgagtcctgctttcactataccagacatgaacatttctttacattttagtgtagagagctaaggaaactccagtggaatttagtaaacaaagaaaaaaaaaaaacaagaaaaaaaatgaccagttttttcagggcctggaaattattcattcttggggccttaggtctctaagaaaaagtttgcaaagcagttgttttagcctattgtttcccaaaatatgttcactgtctcctttttattcctttgaaaacttgggagtctcctttttattcctttgaaaactccgtatgtcaagagaagcttgacatcaggcaataaacaggtaggggatggggtaagaacttaaacgctgaaatgtttcccatgaaagggaatagaagcatcttctgttctttaaactcatccttccttttgatacgtgagtgctgggaagggaagagcgtggttcctttaaatgatatggaagcgggaagggaagtgttggatagcggaggacatggtccctggctagggctccacccccacggacctaggtgaggacaggcacttgtgccttcactcctaaatgttgcgtttcccaacaccaccctggcctgccatgcccccatcctgggcctataaaaacccgagaccctagcaaggcagagacagaagtggctggacgtggagcagagcagataggcggaggaagacacaagtggctggacggtgagaggacacggaggggaacacgccggcggaagagcattttgacagacacaggcactcaagcaggctattgaccagcaggtttaggcggagtttggccagggcagtcggaggagagcgcccgctgcccagcggcccaactccagggataaaccatctcccttctggctcccccatcggtggacagctgcttccactcaataaaactttgcacttattctccaagcccacgattcttccaaggcaggaacctgggatacagaaagccgtctgttcttgtgacaaggtggagggtctgattgagctggttaacacaagccgcctatagatggcaaactaagagagcaccttgtaacacacgcccactggggcttcaggaactgtaaactctgctgtggggtgcccaagtctgtatgctcccctagaggtttgagcagcaggacactgaagaagcgagccacacctccgtcacgtcctgggagggggacaagggaacctttcctatttcactttaagcgggcagaaatgagaaagaaatgacattttttaaatttttccttagctaacaaatgtagggtgtctgggaaagttagtagttcttcctacagtagtagaaattgaaaaaccttcactggaaactctactcccatgtcctggcatctgagaaagttacctgctttacttgatgggaaaccttggtctacaggaaagtttgctgatgaagaaaatttcagaaagggggagattttggggttggcaggctcctgtgtaggaaacagttaacattctttaaaaaaaatttcactctgggccgggcgcggtggctcacgcctgtaatcccagcactttgggaggccgaggcgggtggatcatgaggtcaggagatcgagaccatcctggctaacaaggtgaaaccccgtctctactaaaaatacaaaaaattagccgggcgcggtggcgggcgcctgtagtcccagctactggggaggctgaggcaggagaatggcgtgaacccgggaagcggagcttgcagtgagccgagattgtgccactgcagtccgcagtccggcctgggcgacagagcaagactccgtctcaaaaaaaaaaaaaaaaaaaaaaaaaaaaaaaaaatttcactctgatatctataatcccaatgcctttgtacattatattgttctctcacaacacctagctcttactcatccttcagactctggaaattttccctgatctctctgcagaccacattatgtgcccttatcatttttttccttcctccctcccttctttccttctttctctcctttattttttcctttctttctgcatttcctttatgtacacttatcacattatatggcagttatttgttttatattcttttctagtagactatgagcttctaacacaaggaactgcacctatcctgttcaatttataccactgcaatgttgagatgtttgttgaatgaatggattaattaatgaacaaataaaggaatggacatataaccatctttgcctgtttgtgtttcgccctgagatgagcatgtgagtgacaggatttctgggaattagtggtgttttctctgatgtaatagaagagcagacccaaggctcagaatggcacgttttattctgtgacttgtacttgccaacaataggaaccattataattttactggatttctgagaatcagcaacatatgtgtgtagtaaaaataatgacaacaaaagcaaatagcctgatgaaaagagtccttagcatgcaggagtcttcccactctgatttacccttgtggtcaggtcacgcttccaaactaactcattgttgcctcaaaacattcatcttaagtagtatggatacaatgcaagaacaaatctgaatttcttcaaagtaaaaatgttgatcaaggaataaaaaaatggcaaacaaagagacttgaaacattgtgatggaagaatcatactgtatcaaggtgggaggggaagttatttttaaggaataattgagggtggtagagacttgggaaagaaaaaaaaaaagccaggatttcacatgggagtgcagacaaattataatttactaagagaagttcaaactgctgacagtattgtcacaacaaaagtgagtgattgccatatgcacagaacttaccggaagaagtgtagcaagccccttgatacaaagtatgcatatgaggacaagtaatccttttggacagggaacatggtgtcttccattttctgaagggatgcagggaccacagggaagaaagtgcagaggcttcactgtcccagacctgaactacagaaccaagcaggtgctggccactaagcagacataagaatgtgaactgagaactgagaagacatataaataaatgtttcctaattttttgtttgttttgttatgaaagcaaaaagggcactgcagaaatgataagggacagatgatttttaaacatctagtctcgttataaaatcttgtcacaccacaatcacaatgactgtgggactgggagaaacttgtcatttgccatctttaactgaaagcgatccaatagtcccatagacagttcttatggataaacatagaaattaacccttctggtcttaaagcttgaaacttacatttgttatttcttttttccttttttttttttttttttttgagatggagtcttgctgtgtttcccaggctggagtgcactggcatgatctcggttcacacaacctctgcctcctgggtttaagtgattcttctgcttcagcctcccgagtagctgggagtacaggcgcatgccaccatgcccggctaatttttgtatctttagtagagacggggtgtcaccaaattggccaggctggtctcaaactcctgacctcgtaatccgcccgcctcaggctcccaaagtactgggattacagatgtgagccaccacgcctggcctacatttgttatttctgagttcctcaggagaggacctccagtcttctcagaaggtatcaaataactgaaactcaccagatcacagcatccagacaatgagacgtcaggcccttcattcattatgattgcttccttacccctcctgactttgttttctcatacattattacattttttccttgctatataaacccctaattttagtccctcaggtagatggatttaagactgatttcccatctcctcagctgcagcacccgattaaagccttcttccttggcaatactcactgtctcagtgattgactttctgtgctgtgagcaacagaatctagactgaacccctggtgtttcggtaacatattccatcttctaatgctatttcttctatatgccttaatggttacatgtttcttgtacagtagagaaacttctatggtgtatatcaccacttaacttcttattttttcagctaaattaaccagaatgcttgtgaatgcagtgcactgatttaattttctgcacacttatgagatagtagcacacagcccataggaagcacttaattgatgtttgttaaatgaatggatgagtaacttatgtgaaagcacattctctggctcaagtagttcaagttacttccaaatataggcagaatttgaggatataggcaatgaagagaaaagcccatggattttggatgtaaacaatttagtttgaacatgggtctgacatttactggctatattaccttgggcaagagttaattctctaagtctcagtcttttcatctataaaatgtgtataataatatccttatgggaagattgaatatacaatttatatgaaccatttagcacaatgattggcatatagcaaggacttgatattatttccgtttttcttcactttagttaactcaggattgtcaaaaccacttgagatttggctctttgaaaatagtcttgaatagactggaagtaatatggaaaattgttaacatatgttaattccaggtggtagtaatagtaccatgattatatatatttgtgcttttctatgtctttaacagttctaaaaattaaacacataaaaaacaaagcattaaataaaatgacagatattattaaataaaacatcaaaaataaattgattcctacctttataaatatagaatagggaattgagtcattcagttgagttacatttgttgagtaactactataaacaagactgatgtggagcttacagttcagtggggaatacagatttttttttttttttttttttttttgagacggagtctcgctctgtcgcccaggctggagtgcagtggcgcgatctcggctcactgcaagctccgcctcccgggttcacgccattctcctgcctcagcctcccgagtagctgggactacaggcgcccgctaccacgcccggctaattttttgtatttttagtagagacggggtttcaccgtgttagccaggatggtctcgatctcctgacctcgtgatccgcccgcctcggcctcccaaagtgctgggattacaggcgtgagccaccgcgcccggccagattttttttttaaaacatgtgatcagagcaattgaaaggaaatacaaggttgtaacagcacattatgcggcacattttacctggatttaggagattcggaaaagctaagaggaattaatgatgtgtaggagtaagtgatgtataaactggcaggcagagaatgaacaggagtgagggatggaggcggggagtgtcccatggacaagaaaaagcacatactagagactacagggaatggagaatgaagaatagttcaatatggatggagcatagggttcaagatagaaggtgggggacagacaaggcttgcgaagagggcaggggtctgatcatgaaaggccatgaagctttgtacctcctggggagagttcatccacaaaaacatgacccccatctgtcactgttagcgaggtctccattttttgtactaatgttgtggtgcttaggaagcaataattcagtgcttgaagtctgatggaatgctgtggtttctggggagcccagaatcatggtgctgctatttttaatggacagaaacttactgtatttcaagtgaataaaatgagcatagaggttttgtctcctacacattttcaacctaaggacttttatagatggatcgaagctgtcctgagccaaagtgtatcagttctgcctaccatcagcagaagatattagcagtggtttgtttaatttctttttggactttcagagaaacagacttgaagatagcctttgggaagctaacttgtaagtacataagctttgtaatacaaagttaactttatcttaattttcgtatactgctgacattttcttgcatcagatggattatgtttgtgtcccggatcttgaggttagccagagtttgtaaaactaataaataattttacaatctggaagatttttcttttaacaaaaccaatggcatgtgtccattatcctatggagctaggacaacttgagtttggtttggagaatctagaacacagttgctctggggcagggatgaaggaggattacattctaatgacagtcatttgcaatgtctcatcgtgttcaaacataggacgattacacaaggtttcataatggaaaataagcggtccagataattcagaatacacaaaccatttggtgaccttgcctgtgactcctcagggagggagctcataggaaaactgatgatctgagattgtgatttgcccaaagttgcagaataacattatactctaattcccaactgttgctctatggacttggtttttacaattatctaagattttcaaagactctaagctttgcaaactctaattacatgacaaagttcctggccattagcttttaattttagagtatactttttattgtcgtttgagttttatgtactttttattgtcatttgaattctgcatgatgatagtcttcctttccttcactccctaccctgatcttcctttctccccaaccctattgatactgagaaaattaacatctcatttggaagtgggatgtttgaagggatagattatctttacagtttgtttcatgtgtccaagaaaatttttaagctgcagctcggggtagcatttttctttcctccagctctgtatttttttcttatttaatgtgatcagtagttcaaagcaggatctatttatttttggctcactttccacctcactggttgtgacttttagatgtgtatgtggattttgttctcacaggaagatctaaggagaccctgttataagcatgggttaaccgccataaggcacagctggtgcaaatcagcatgatgcagcatagcttagggttattggcagcgcttgtgtttagaattatacagtaaagaagaaaaggggctctgtactataggataggaaagaaggaaaaatctagcgggggagaagggaggatatcaaacataaacaggagagggaagacataaaagagtaggggttttcctagtgacctcataaacaagtagtatggggaaaactgtatactatgtaaagttttactaaataaaatgatgtttatatataatcctttatggtttcagggatttgggacaccttattttatatgatatgtttctgtcctttatgggggtaaacagagaaactgtggggaggcttgatagcccatggagaactgggagggttctttaaagaagttggggagaatggaaaatctaggatgggaaaaagggtctggattctatattccaaattctctgtcctcagtctgatttgatgtatgtcatctatggttcagctacatgtctcaggttttggatcaaaatatacatggtcagcataagtctctctgagcagattgacatattttcccagatcattacaaaagagggctcatcctttagggaattgtctgcatctttcctgaggcctggattcagtgctcctttgaagacaaatgggccgtgataggtggagcagtttctgtaagagatggtcctgtgccaaccccctggcagaattgtacacctggcactggtacaactggtgctccgcttagacttttctctcagtctttcatggacacctattaggtggctgggaggaagaaagaaggggaaacttcctcctcccctggaggacagactgctatcagtaaggaagctgtgtagctgttcattagaagtggtgattcttatttggagcattgcaaaatttcaaaattttcccttccttccttccttccttccttccttccttccttccttccttccttccttccttccttccttccttccctccctcccaccttccttcctcttctttctttcttatagtcttgctttgtcgtccaggctggaatgcaatgtcacccaggctggatcttggctcactgcaacctctgcctcctgggttcaagaaattctcctgcctcagcctccttagtagctgggatttcaggcatgtgccacctcgcccagctaatttttgtatatttagtaaagatgaagtttcaccatgttggccaggctggtcttgaactcctgacctcaagtgatctacccacctcagcctcccaaagttgctgggattacaggcatgagccaccgtgcctggccaaaatttctttttattatcttgagatcaagacgtgctcaggtttcacgatgagtgtgtaagatgactctcgatgctaattctaggacagtgtgtgaggtagcccccacagttaattctgggtcaaggtgagtgtgtgagatagccccaaagtttgctctaggtctgggtttgtggattgtgttggaaactttaaaaaacaaggacttgtgtagaagtttgaggaaagatagtttgtaaatttgtatctttttttttttgaatgataggaaagcatcagtgttgagttctgcaagccaattgaaaacagaaggtattttatgcatagtgtgtgggtgaagaatgtatttgtgaaggaggaaatgggtcaattgaaataactatcaattcataaaagagaaaatcagtatctaattagcatgaagaatgctcagatcaaatagtgtctaaaatgttgattcagtttagttttatataaaatacttagtgagatataaaggatatagaatttgataaaactcaccttgattccagtttcctccctgggagaatacctgtgaatgggtgcaacattcttaatgtgctgggtgacttgattttttgcaaataattattttggtggaaatgtgggttcataatgtttctaatatgctttgcgtcatttttcaggagcatgataaatttgaactgttacatctattttactttggagcagtcctccttgtcgtcaagggcatccatttttgaaacagctgtttggattgagggatacaggatgtggccataaagtagatcaaagttaattggccctcagggtaaacaagctcatgaccttggcctcattagccctgtgctgtaactagctgaagtaacctgccctgggcaggaagtttgcttccctgaagaagcttcagcatttagaaattatccaataagtcttctcattttgccaacctgccctcttctgccccagcactgaatgcttggatggtgagtgagaagagggggagattcagtgctttatgggattaccatcaggtaggaaaaaaaatgttaaagtcatgcttattttataggatttgtatacaggcttgaggataggttttggccaatagaaagcctctacatgtgtcacaacaaaaggtgtatgataggtgatactttcagcgcggtggactcttttgagtctcagttttgccttacctcttcatactgtctggataaataatgaaatatgccacaatagccctgaccatgaaatggattaatgaagctgcagttcaagactgtacacaagagtaaaagacatttttcctttcccaggcccaagaaaacaaaggagtcatgctgttccgtggcaatggagccaccagcagctcctgaaggccagttctctgcagctggtttatattcctcacacttcagggcctattgctaagtaggtttgtcaacatttcctccaagcacctcttttctagcctttccattggccagagggatggggcagggataagagtgatccttccgactttatggatagctaggacattttggttcttcatactctcaggcatggactagttcctcttatcaaaatctcttttctgaagtaaaataagtagaaaaaaatcaaattcaattgaaaacccagatgaagcaattattactcttcttttttccacttccttctccttcctaacacacacagtaaacatttttttggagagatcaatttcttctatgtagactggaatacttcccccttaccttagctggctgaaagtattatggattgctctgctaagaactctctttttcttccctctttggccacatacccagttgctattgaaaacactaacttagaaacccattaaaatagttatggaatatttattaagttttttaatactgtggagtataagaaacctaaactaggccccggtttttctcccaaatgccactccactctgttaagctatttctccaccccatctgatccatttactgaaagttaaccactgttaaccatttctcgagattctttacagaagaaaaaaatcatgcatgtacctgaatgtatatatgtacccatctctacatatatgtgtgtgttttaacatataaggtatcatagtgtacatgtcattctatacctggcatttttcctttaatgatgtgtcttagaaatcttttcatgttggcacacacagatccatctcattctaactacacagtaatccattacatggatgtgccattttcatttaacagtctctatactgatggacatattgatgtatttttaaaaccacaacaaactgtgctctaaaaaggttatgcccatttgcactctcaagagtataaaaatccattttgaatagatagaaaaataatattttcccagactcatgtagctggtttctgattttattcctaaagtgttttctgtgttctagtttatgaacacctgatacataaataagtgatgttcctatctagctcttaagctaatcaatagaataaatcttctttcacaccttacaagttaatgttcaccctgtgcttggccagaaaaggatgtgggttctatgaggattgtccaccgatggcactctgtccccagatacctgccacaaagataccagggctccaattccagaaaacatagcccaggaaacaggactttactattccatctccacccagacacgtggtattttgagaggttattgccaactctgctgcctttacacagacccatcaaatttgtgaggcaagatagaatcttttttgctacttctaaaggaaactcagtgcgttcatcagggaaatggagctcattacatggacagggaagctgggaggaataaccacttaaaagcactttgaagcgtgttcaatcacagttaaatgcttcttcataaaacttgatttttgaggtctgtttggcatcatagaacttgcaactattgtgtcttcataactcatggcctgggatttggcactacatatttttatggctgaacaggaatagtataatacacatgagagctactcagatatctaatattacagaataatgcagaagacagaatagatattgtggtgggtggattataattattttatttttgttggtaatgtgctctaggtaccatgcagggatttggtgagattgctgtcatattttctaaagtatctggaattcctaagaggaaagctggaaaatgagtgcaaagtaatgatgcacagtctccttaactctcctagtgccatgggggtgtagacaatggcaaaatgagagggtagtcagacgtccatgtgtagatctcactgctttacagggaacaagaggctgagtattgtactggatgcaagaatcaactttgcccaccttaatcataaacagaaatatctagttctccggcctgaaccttttccactggtactgaatttctaaagataactgaatttctaaaagataaccgggggagggtagagctgcattcccaggatccttgagtttcctatcaatgaggaaagctgctgcttatttgtggacccagtgggtgccaaaaggaagaactgaagggatttctactgggttactgaatttattccagctccgttttggggaactctcaaaccttggggtgaggagtgggggttcccagatgaattcaacaagagagagagggagggggagatgggaagagataagttcaaatagacaggcaaagggaagaaaataaggaacacacacacatacatatatataatgatacttagattggcacaaaagtaactgtggttttgcattgaaagtatagcaaaaaccacaattacttttgcaccaatccaatattattacctaaggactcacagagatttccttaagtccatagggacaggagcccttgccctccatgcttcaggaatgatttgattaaggatactaaacaggcatgtgacaatgtgagcttgctcaataataatccttgatggactattactcattttgtgaaattgagccaagtctctctttcctgctccccctttctccttatttccctttcccccagctactttgctttgctaagtaatcagacatggatcttattcccaagatatttatattcttagggaaataagacatttaaaataaggaagaatgcaataaaatctataatggaaacccagctaatgagccacaggagttcagaggagggagatgtaaccagttggagtggggaggagattatggattgtcatatttttgaatttaatatttattgtgaatgcctaagttaaataggaatggaatgggaaaaagacttttccagggtgtggagttgtcaggaataaatcagggaggtctgcagtcttggggcatgaatagcatacaatgatgagattattctgagtggagtgaagggtacacaagcatattaaggaagaagtttcaatggtgtggtggggctctaatctgcagggccttgaatgttcattgtcatagctacagataattgttagaaatagcctggtttgctgcaaaagacagggcaaactgggagggaccagatctgccctcgaggattgatcaggaactgtgaggaagtctaggctggcagacaaggcattagaagagatgtgcagaagaatatggcgatagatgacaagcggtcacccagacaagttggtactgagaggtaggagacaagtctcaaggagggaaggtgcctgatactgggaaatacaggaacaggtggcacttagaagtgtaatcaagactgagggaataagaaagtctgtcagcagttagcaggctccagccgctatgctcaggttcatgggcagacttccaagctctgggaggaaacagcagaatggaaagcaagaagctgggccccagccccagagggaccaggcagatttccaagccaggagtcagacctggaacatgggcctgactagcagtaagaatggttcaatactccattccagagtgctgagccaaagtcttttaatgccttctgcttaaggttatgactgaccttcgacgctgggtttacaggtgggagcagagcggtccagctgtttggaggggaggatgcagatactggagaaacagtcagggttcactgctggctaaagagtctaggccttatttagtgggcaaaaggagaacaatggaaaaattaaaacagaggaatatcttaattggagctgtatttcaggaagatcaatttgatcctagtgtgtaaaaggaaccagagttaagtgagtcctcacctgtaacaaatttcggccattctccttcctaagcacttctccagtgtgttcacttctctgcaggcccccttctaatactgtggcataaactatatgagtaaaattcatacaattaataaactaataaaacattaatttcacgtgtttcttttcattcttttcatgtggcttctggaaaaagttaaaatttataagcggctcacattatttttcagtggggcagtgctgctctaatcctttctccatattgcggttagaactttttaaaatgcaagtcttctcatgtagctctactgcatgaaatctccccataatctccattgccccaggataaagtctaaattccttagcatggcccccaccctctttgtcatctggccttagcccatctcccattgcactaatccttcaggtgtatcaaactattttcggtccacccgtgaaattactttgtattctttggcatccatgcctttgctcctgccattccttcgcttgaactgaatatttctcccctttttcatgtgttaacttttgcctcctattaaggtctcagctgtaggcatacctgactccttgactgtggattaggtgcttctccttgatgctaagggccacatcctgtgcctgctctactatagcatttctcgcattatttttgaggtcctattatctttatcctctacctagactgcatgttctttgaaaataggaactctgtattgatctttatgtcatgtccagcacccagcacagtacctggagcataatagctgcttgcatgattgtatgaatgaatgaatggggcagatgtgctaggtgaaatgaacctgaaccagcatagtggcattgggaatgaaaaggataagacactcatcaagaacgtaatttgtgagtgctggcaaccatgtaaattgacctctaattactggttgggtatcctttattcaaaatgcttttggccaggtacagtggcttacacctgtaatcctaacactttgggaggataaggctagaggatctctggaggccaggagtttgagaccagcctgggcaacagagtgtgaccccatctctacagaaaacttagctggggatggtggtgtgtgcctgtagacacagctacttgggaggttaaggcaggaggatcgcttgagcccaggagtttgatgctgcagcgagctgtgattgcactactctactccagcctgggcaacagagccagaccctttcaatcaatcaatcaatcaatgaaacaaaatatggaaaatgcttttgtctaggcacagtggctcacacctgtaatcccagcactttgagaggccaaggcaggaggattacttgagcccagaagtttgagaccagcctgggcaacatagcaagatcccatctctaaaaaaatattttaaaaattaactgagcatcgggatgtatgcctgtaattctagttattcaggagactgaggtgggaaggtcttttgagtccaggaatttgaggatacagtgaactatgccactgaactccaacctgggtgacagactaaaatcctgtctctaaacaaacaaacaacacacaaaaaaactgcttgagaccagaaatgtttcagatttcagatttttaaaatattttggaatatttgcattataccagttgaacatccctaatcctaaaatctgaaatctaaaatgttccaatgagcattccctttgagtgtcacattggcactcaaaaagtttcagattttgtagcaatttgggtgccagaatagggatgctcaatctctactaatgagtatgaagaactaatgcaattcataaaatgccctaagtcctaaataatattaaaaatagcaatgatgtggacaaatgttctaaggaaaaaagaaacattctttttaaagtattctgatacttggagtcaaaagacaggtttaagactttggtccagcatttatgttgtctgtagtcttgatatttcagttttttaggtcataaaatggagacagtaatacctctacatttggggctcattgtgagtattaggggaatatatgtagaagcatcttgcaaattgaaaagtgacagaaaacactagttattgccaatacaaaaatatttatacctgcaagtaggtgataaacatgctgtagtgattaaattgtacataatcgggacctgctcaaataatgtaaatctcaaacaaaccatcctagcacagaggaacgtggacaatttacactttgtcacatgacattccatcaatacaactcatggaatgagctaatgagagagtgagcaagaggtggcttgattgggcgccctccttcccagtgcccggtctgtgatggcctcacatttgacctctaactgtggctcacactattcactctgcttgcattgctctcttcttcactcctgcattgcttcactaaaccccagccctaccaccttaaaactctactcacattttaagtctccttcaggatgccttaatggggtacgagttctttgtctgaaggctcacagcattcagtacttctaaagttgtcttttttcctctctcaagagagatcccaatatcgtcttctcttccatttcctggtcaaggatagcactaacacctaagtatttccaaggtgggaattgaaagaggcctttccatccagcctgtattcctgtccccagacatgtgccagacctgtgctaggatggctgaattaaatggaacaaatgataacattagcatttgaatttggaatttagggtcaggatggttccatagaagctgctatagtttggatgtttgtcccctccaaacttcatgttgaaatttgatccctagtgttggaggtgaggcttaacagggggtgtttgggtcatgggggcagatctcttgtgaatggcttagtgtcatccttgctgtagtgagtgagttcttgctttattagttcccacaagagctgattgttaaaaaaaacaaaaacaaaaaaaaaagagcctggcacctccccgctgtctctcttgcttcctctctcaccacgtgatctcttacagctccccttcaccttccactatgagtggaagtagcctgaagccctcagcagatgcagatgctggtggtgcatctgcagagccatgagtcaaataagccttttcttcataaattacccagtctcaggtattcctttatagcaacacaaaatggactaggaaagaagcccacactcacttgcttcccttttacctgcttactttgttcattcccttgtttgtctcctgtactagtcagggttcactacagatacagaaataataggaatatatttaattgggaattggcttacatgatcatggaggctgagaagtcacatatctgctgtctgcaaccagcagcgaaattcagtctaagggcctgtgaatcaggagagccaatgatgtaaatcccagtccaagcacattaaaagatgagatgagatgtcccagctcaagcagtgaggcagggaaaaatgggacaaattcctccctcctctcttctgttctattcagtctctcaatggattagatgatatccacttccattggggagagcaatctattttacagaatttactgattcaaatgctgacctaaatccagagacatacctagaaacaatgcttaatctggacactcattggctcagtcaagttgacacataaaattaaccatcacacctcccttactttagatccaggagcagtatgtatcatttagtactttatgcacagtacatgttctgttgaggtcactaaaatagttatttatttacctggcccttgacagaggattatttgaaggattatgggattacataaaataaaacaaaaacaagggacatacacacagtatattatactattaaaacaaattagtgctcaagaagagaagatgtagtgctattcttatttaggaaaaatatacagtattagcctatttgacatgtgtgtgaactaggggggcacgtccaggattctttttaatctgtgctccctctaactctccaattctgtcttctctgcctagattgctctcttcccctacccaccccttccactacaacttctgattaattctgcctcatcttttggatgtcacctaagagattgttttctttgggaagtctttcttgaattctatgggcttagcctgtatactgtaataggaggttttctctcaacatttatcatatggtagtgtaagtgctttgtctgtttctccctctaatccattagcaccatgaggcaggtaccatgtctgtcatgtagaaagttagttctaccagctgggcatggtggctcatgcctataatcccagcactttgggaggccgaggcgggtggatcacctgagatcaggagttcgagagcagcctggccaacatagtgaaatcctgtctctactaaaaatacaaaaaaaaaagttagctgggcatggtggcaggtgcctgtaatcccagctacttgggaggctaaggcaggagaattgctcgaacccgggaggtggaggttgtagtgagccgagattgtgccattgcactccagcctgggcaacgagtgaaactctgtctcaaaaaacaaaaaacaaaaaaacaaaaaacaataacaaaaacaaaaaggaagctctaccatgtgtagcacagtgtctggtatatagtggtcacaaaataaatattcattacataataagtaggcaaaagccagagcaatttggaatcagagtatatcagagtaagtcttagtatattattataagcaaggctttggctaaatggctcctttacctctactgatttctgctctatttaaccaggtatattaattggaatataggtttggctgcttgtcacagatctatgccagtttaaacaagaaggaattttctttgtcacaaaacaatccagagataggcagtcatggacaggtatggcagctttgttctttaggatattaggttggtcaaatgtaattgtggtttttgccattaaaagtgatagcaaaaaccgcaattacatttgcaccaacctaatagtcagaagcaggcttttacttattttttttttgagacggagtctcactcttgcccaggctggagtgcagtggcatgatcttggctcactgcagcctccacctcccgggttcaagcgattctcctgcctcagcctcccgagtagctgggattacaggcacccgccaccacacccagctaattttttttttaattttttggtagaggtggggtttcaccatgttggtcatagctggtctcgaactcctgacatcaagtgatgcacctgcctcagcctcccaaagtgttgggattagaggcgtgagccactgtgcctgggctccaggctttttctatcttgatgctccaatatcctatgatgatgccctcgttcccatggttcacagccatgacacaatcccagtaggtccacttttgtcctggaatccttggaacctacacccaaagccagtttaatttcttttgggtacctgaactgatttgaggaccttctggaccatgtaaggcagcttgagtctggtatggatttatagaattaatcaagttgaacaatttctcactgcttgtctaatccatgccttaccctcaagccttctcaagtgggaaagactaataacttagccttagttgggtatgtatgacaagaatgccagctggttcttatgccaaggtcaagcagccttcaaacagggtggtatggtttcctgaggcacaggatacaataagttaacagaagggcattctaacaagttataaaagagaaattgcttggaacaatgttaactatattatctagttagctatcaggaaaagtatagtacttatttggctataaggttgccacaaaataccattgcaccattatttctttacaatgcctttctgttgggtttatgttattctggaaataagtcattaattcttattacagaagtttgaaatgaaggccagcccactctatcagttctcccctcccacgatatatacacacatagcacagatagcacatgtatgtgtacacacacacacacacacacaatctctggagggaaggagagaagagagaggaaaatgggagaagaatcagggtaggggtgagagctgggtgcagctttctagagcattagctattcactcatctagaagacgctgaataaacaaaagtaactactccttcccttccccctccccaaactaaacattttcattctgtagacctcactttgtgtcctagacaaaacaggatcagtgtgggtcattatgagatgattctgccagtttaataggaaaataacaaaaagcaaagatctgtctaaatttgttcttggcaaaggcaacatatgagatattatctgatttttaaaaagacgttatctaattgatatacaatccacagttgattttctaaagtggtaaaattcacttttctttgtgttttggtgtgtctctgtgtgagtagttatatttgtagaattttggttaatttttgttacaattatatttccattatatatgtttttcttttctttccaccttctcaaaagttctcctttaaagcagaaactttccattcttggtttcatccaaaagacaaatatttctgggaaaacactgtgtttaagctattcagcaattctagtgttatgtaactgaccacactaagacttccaattaactttggttgtgttttattgaagagtgtcatagaacagaataactggtgataattttttaaaacttttctatgtttttaaacagggaaagctctcttaaaatatatgcagcatcttttgataagtgtggaaggtaaatctcctgtctgaagtattctaaagtccattgactgtattccaagactgatgctaatctgtctgacattgaggcattaattttcataactcaagttcttcttgctcttctttccctcttgctcgtttccctgattatttttgtttttccttcttcaatgatgagtgcatcttgagactctttttagactgcttctcttcaaaataagaatcatgtgaattcatggtttcaaataatttcccatgtatatgtatgtactaacttagaagtcgctttcttcatttttaatctttatctctcctttctaccactcttcaatatatccaatttctttatccccagaactgagctgatattttttccaaaagcctcataccttcccattttctctttatttttatgtcctcaccacaatcccagtggtctagtcttaaaaccttgcagttttgtggggttttttttttgtttgttttgctttactctgtcatttacttgcaacatgctgcctattatcaagttgtgatgtttatttttcctaaatatcactcggattcatttctttatttcaaaaccctgatattgcctcactcagcctaggtgataattatttggtgtgtacattactgtaatatcctcttttatgtcctttttctactctaagctaacctatggataagtatgagaatcgtcttgttcacagatgaggatactaattttcaccacttttattcaacgtagtagtggaagtcccagccagaacaatcaggcaaaagaaagaaataaaaggaaccaaactggaaaagaggaagtcagattctccctctttgcagacaacatgatcttatatatacataaaccaaaaaagaattcttagaactgataagagaattcagtaaagtttcaggatacaaaatcaacatacaaaaatcagttgtatctctatatgctaataataaactagctgaaaaagaaataaagcaaccccatttatgatagctacaaaaaatacctaggaataaatttactgaaggaggtgaaagatctctgcaatgaaaattacaaaacactgatgacagaaattgaagagaacacaaacaaaggaaagacattccatgctcatgtattggaagaattaatattgttaaaataataatactacccaaagcaatttatagattcaatgtaatccctaccaaaataccaatttttcttccaagaaatagaaaaaacagtcctaaaatttgtatgtaacaacaaaagagccagaatagccaaagcaaaaagaacaaagctggaggcctcacactacctgactttgaaatatactacaaacctatagtaaccaaaacagtatggtattggtttaaaaacagacatatacaccaatggaacagaatagagaaatcagaaataaatccttgtccctacagccaactggcttttgacaaaagcacaaagaacatacaatggggaaaggatacgctcttcagtaatgtgctgtgaaaactggatgttcatatgcagaagaatgaaaccagaccccatctctcaccgtgtataaaaatcaacttcaaatggattaaagacttaaacataattcctaagactataaaactactagaaatgctttaggacattagtctgggcaaagattttatggctaagacttcaaaagcacaggcaacagaaacaaaaatagataagtgggactatattaaactaaaaacctctgtacagcaaagaaaacaatccacagagtgaagagacaacctgtagaatatgagaaagtatttgcaaactattcaactgacaagggactaatatccagaatatataaggaactcaaagaactcaacaggaaaaaacaaaacaaaacaatcccattgaaaagtgggcaaaggctctgaacagacatttctcaaaaaaagacatacaatttgccaacaggtatatgaaaaaaaaatgctcaacatcactaatcatcagggaaagacaaaaaagaatgactattatcaaaaagacaaaaaataataaatgctggtgaggatgcagaggaaaagaaactctaatacagtgtaatggaagtgtaaattaggataaccattatggaaaacagcatggagtttgtaaaaaaaacaactaaagaaagaattaccatgcgatccagcaatgtcactactgggtatttatccaaaggaaaggaaatcagtatatcaaaggaaattagtatatcgaagggctacctggacctccatgtatatttcagcactattcataatagccacgatatagaatcaacctaagtgtacatcagtggatgaatgggtaaagaaaatgtggacacacacacacacacacacacacacacacacacacacgaatactattcagccataaaaaaatgaaattctgttatttgcagcaatgtggatggaactagaggtcagtatgttaagtgaaatgagccaggcacagaaagacaaatattgcatgttctcactcatgtgggagctaaaaaaaagttaatctcatggaaaagaatagaatgatgtttaccagagaggctggaaaaggtggagagggggatgaagaagaggttgcttaataggtgcaaaggtacagttggaaggattaagttttagtgtttgataacacagtaaggtgactatagttaacagtaatttattatatatttcaaaatagctaaaagattatttgaaatgttcccaacacaaataaatgttaaatgtttgaaatgatggatatcctaattaccctgatttgctcactgcacattgtatgcatttatcaaactatcacatgtacctcacaaacatgtatcaataaaaaagtcctcttgttcacactgttcatttatcttttaagaaaattttttaaaaatctgccaactggctactttattcccacctcatttacctgaactatatggtccacttctccaaacaaatatcatctctttccatctcctttcaacatgccatttggaagactcctctttcttcctccccaaacatatttctctatttcttcaaaggtggtggttaacacagccttaataaaagctgaaattacctggtcctttaagagcgagtaccacctgactcattttctcagtgtctcagggctacattgttagtctgccctgctctctttatctgtacttgctgatgtgtggctttgtaacatcatgtagtcattttctttatgccttttctctgcttttagagtacaagcaactttaaggtagagacaatatctaagatttatttatatcattcaactataattactaagtacttgctgattttgtttttttgagacagggtcttgctgcattgcccaggctggtgttgaattcctgggctcaagtgatcctcctgcctcagcctccctaagtgctgggattacaggcatgagccaccatgtccagccacacttactgagtttatagcatggtatctatctatatcaaattatttattgagcatctgctatgtgctaggcacagtgtgaggtgctagaaatacagtgatgagaaaaaactgacattacccatgctttgatagagttaacagtctaatgggagaaacgggagaaacagacatttatcaaataatcatacaattaagtgtaaaattacaactgtgatagagctacaaagagaggaatatggtactatgagagcacataataggggtatttaactgaggtgggagaggagaacagggaaggatgtcccaaagatggagaaccacatgagcaaaggctgtgtgaagggagggagccagatatgttcaagacattgaaagaagactggggtggctggagcccagagagcataggtagattagaggaaggaagctgaagaggcaggcaggggctaacctgggcaaggccctgtggcatatgaaaaggctttaggcttttatactgagcaatgaggagccactggagggatttaagaacaggaaaggatagtatggggttttgagaagatcactgtggtcactgtgtggaggataaattaaagtgggcaggaaaatcaagcttggtgtttttctatgttgtgtagcgactcagtaaatgttgctcattgactgaacagtttgtggggcttatagttcttgctgtaatctctatattatgacgtttggcttcaagctaaaaaatcttgagctactcaaaatacgggtctaatttttaacatagtctcctaagcatttgcaattcattgacctaacatgtagtagtaacagataataacaatgatgatgatagacaacattatctagtatctagagtttagtatctagtgtctagataatagaaaacattatgtatgctcctgagcactgtgctaaaggcatgatgtcaattatcttaattaattcctactataagccaatgaggaaggtgtttgtattcctatttttttttttttttttttgagatggagtctcgctctgccaccaggctggagtgcagtggcgcgatctcggctcactgcaacctctgcctcctgggttcaagcaattctcctgccccagcttcccgagtagctgggatacaggcacatgccaccacacccagctaatttttgtatttttagtagagacaggttttcaccatgttggccaggatggtctgaatcttttgaccttgtgatccacctgcctccgcctcccaaagtgctgggattacaggcgtgagcctctgtgcccggcctgtatccctattttcttagaaatacgttgtgcacgtgtaccctagaacttaaaatataattaaaaaaagaagaaataggcttagaggtgttaaagaccttgcctcagagagaagtggtgggactaggactcaaatctagttgtctctaactgcagagccttcactcttagctactttgttatagaagttctagtttatcttggttttcagtaccatttcaataccactattatgaaaaaggagattccttcagtcccacaaagagatatgatttagctaattgcccagtaactccttcctcaattttggtcaaagcctccatggcatcagctcacccagctcccattctgcagatgttttattacatgtcacacaacctggcattatttctgagttgatggttgtatgttttgatcttttcaaacatgtggacaaatttctggctggctgtccttttttcttttacagaaatatataattagatgaggtaataatgctcattagcccaagttacaaatagtatttcagtatccaacttcctccttaggagagcatcatcactgattaagaataattgccaacaattggccgggcacggtggctcacacatgtaatcctagcactttgggaggccaaggtgggtggatcactggaggtcaggagtttgagaccagcctggccaacatggcgaaaccccgtctctataaaaaatacaaaattagccgggcgtggtggtgggcacatgtgatcccagctacttgggaagctgcggcaggagaatcgcttgaacccaggagccggcagttgcagtgagctgggatggcgccacggcactccagcctgggtgagagagcaagactccatctcaaaaaaaaattattgccaacaattggtaaactattagttgaaaaatgtttgccatcatggccggaggagctctctgcctttggcctaccatctgctaagtgctatttgcttgtttcttctgtcttcattttctataccctagggcagcctcttctttagttgtaatacgtctgcctaaagtgggcttgtaatttgcttgcctaaatataaaaacgtaataacagagcattgagaatttttcactcataccttatagtatttctgtgataactaataaaatcagcttggtccctcagaaaatggaagcaacggcttactggttaaggagttttcagaggactggtcatctttaaccaaacatgactggctctttaccctttgcaaaggaaggttgaaagttcaagcaaaaagcaggtgaaaccacagttatcatagctaggaacaaccatagcagaatgcccaactgatagtggaaagctgaagatggaaagttgattggtaagcaacacaggctgcaaacctaaagaatagggagaagcatttcatagggatattggaagaaataaatagctttcatattgttggaggaaggaatcaagaaataccagatttatttgcttatgtcctccaaaaggttttatggatctataatctttattatagtttatgagtaaattattgcaaaagggcaattatcagttttgttcaaaagtccactaccagtgagtgggagaagtttcacattagtctgcttaggtagtggttataggtaagtagaggcaatttgtgctcagtagtactaaggtgtggaatggaaatcctgccctctcacttatttatttttcttcgcatggtattattattattattgccctctcaggactgctttcttctaaacttttgactgggcataggacattatagtgcagcattcagtttgaggatgacaaagccaaggccttctcatttcttaccattttatgttgatattgccatcttcaaggcaagtttttttaaaaaacaactttattgaggtatgactgagatgcagaatgctgtacatatctaatgtatacaacttgatgagtttggggataagtatattcccatgaaaccatcaccaccatcaaagccacagatatatcatcacctcccaaagcttcctccttcctcctttattattattattagtatattcttattattttgtgtgtgtatgtgaagatcacttaacataagatctaccctctcagaaaattttaagtatataatagagtattggtagctattaggcactgtgttatagacctgtagtagatccctagaaggtattcatcttgtataattgaaacttggcaccctttgaccatcaccaccacatttctcccaccccctcaccctgccaatcaccatgctactctgcttctatgagttcgactattttagattccacatgtgagaccatacagtatttgtctttctgtatttggtttatttcacttagtatgtatttcaggtccatttatgtagccacagatggcaggatttccttttttttttttttttttttttgacggagtcttgctctgtcgcccaggctgagtcttgctctgtcgcccaggctggagtgcagtggcaccatctcagctcactgcaagctccgcctcccgggtttgccattctcctgcctcagcctcccaagtagctggaattacaggcgcccgccaccatgcctggctaattttttgtatttttactacaggcagggtttcaccgtgttagccaggatggtctcgatctcccaacctcgtgatctgcctgcctcggcctcccaaagtgctgggattacaggcatgagccaccatgcctggcctccttttttaaggttgaataataattgtatctgcaatattttgactattgtgaataatgctgcaattaatatgggagcgcaggtatctctttgagatactgatttaaattcttttggataaatacccagaactaggattgctggatcatatggtagttctatttttaattttttaggaatcaccatactgttttccatagtggctgtaccaatttactttcccaacaatagcatatcagggttcctttttgtctgcatcctcaccaacacttgtttgttttttgataatggccatccccacaggtatgtgttgatatctcattctggttttgttgcattttcctgatgattagtgatattaagcatcttttcatacacctgttggccatttgtcagtcttctttggaaaattgcctgttcaagtcccctgtctcatttttaaaatcaggttggttcgtttgctgttgagttgtatgcgttccttatatattttggatattaaccgcttatcagatatatggtttgtaagacaagtttttattacatacttatttcgaagtacagtgtccattatactttcactgtccttacttttctgttatgcaatataatatcttgcccaggtaaaagtataaagaatactcaggttacaaaccaaaagcagtaaacaaatacaaaattacattaaagggaaatggtgtgaaagtagagagaggagatacatttttattcaatgcctcctatgttccaagtactctatcagatactttacatagtatatttcgtgtaatcctcatgataagcatgacaagagacaaatgagaaaaataaggctgtgagaagtgagggtcagactcttggttggcaagtcatccagagctggaatttaaactcatatgccatatgtcccatcatttacccagacacataaatatcactccatatcatcctacataagtacatgctgtcataatttttatattttttaattcttcttgcagccagagaggtagaataaaatgtagaaaaatgtggtgtcatagagaccaatgaatacataaataaatgaatgaatggggtatatatattgtatacttccatttctagacagactctattaaagaatcagcacaccagctgcttgcatttgctctttatctattggctctggtaaaactgtaaagcaagaaattttttttttctcccgtttgttgctcttccatacctctttcctcttatatgctagaacttttctgttgttactgtcagtgtacaccaaatatggcaacacaaaactattcctagaacatactaatgcttaaatatagatcttcccctatttagcagattttcgtgtgtacagtacattattgttaactataagcacaaagatctctagaacttattcatcttgcataactgaaactctgtacacactgaacaggaattcctcatctgcccctctctccagccccaggcaatcaccattctacttcctgcttctaagagtttggctattttagataccttatataagtgggatcatgtagtatttgtccttctgtaagtggcttagttcacttagagtaatgtcctcaaggttcatccatgttgttgcatatgacaggattttctttctttttaatacttaataataccacattttctttatccattcatctgttgatggacatttaggtcgcttccacctcttggctattgtgaataatgctgcaatgaacatggaagtgcaagtatcgctttcagatcttgatttattttggttaaatacccagaattgagattgctagactatatggtagttctctttaattttttgaggaaccatactgttttccatagtggctgcaccattttacattcctactaacagtgcacaagggttccaatttctccccattctcaccaacacttgttattttgtgtgtgtgtgtgtgtgtgtgtgtgtgtgtgtgtttaataatggccaccttaacaggtttgaggttacatctcattatggttttggtgtgcattttcctgatgattagtgatgttgagcactttctcatatatgtgttggtcgtttgtatgtcttcttaggaaaaatatctattcgggtgttttgcccatttttaaattgggtttttttttctattcagttgtagaagctcttaaaatattgtgggtattaaccccttattagatacatgatttgcaaatattttctcccattccataggtcatttattcactctattgattgtttcatttgctgcacagaagctttttagtttgatgtactttcacttctctaattttaattttcttgcctgtgcttttggtgtgatatccaagaaatcattgccaaggccaatataataaagctttccccctatatttttatctaagtcctttgtgttgctataaaggaatacctgagagcaggtactttataaagaaaagaagtttatttggctcatggttctgcaagctgtacacaagaagcatgacgccaacatctgcatctgttgagggcctcaagccactttagttcatggcagaaggggaaggtgaggcagcgcatgcagagatcacatggtgagagaggaggcaagagagagatgggggtcatactccttgtaacaatcagctctcactggaactaataaagtgagaactcacacaataccttgaggatggtaccaagctattaatgggggatttgcctccatgatccagacacctcccattaggccctacctccaacactggggattaaatttcaacataagattatgaggggtcaaacaaaccaaactatagcaattttctttaaggagttttatagtttcaggtcttatgtttaagtctgcaatccattttgaattgatttttgtgtatggtgtaaaataaatgtccaatttcattcttttacatgtgatctagtttttgtacaaatgttttcccagcaccatttgttggagagattatcttttccttgttgtatattcttggcatccttattgaagatcagttgaccacatatgcttgggtttatttctgggctttctgttctgttccattgatctgtgtgtctgtctttatgccggtaccataaagttttgattactgtggctttgtaatatgttttcaaatcaagaagcatgagatctccagctttactcttctttttcaagattgctttgattattcaggatccttcgtagttccatttgaattttaaggttatttttgctatttctgtcaaaaatacacttgggatttcggaagggattgcattgaatatgcagaaagttttggataatatggacattttaacatattaagtctttcaacccgtaaacacgggatgtctttctatttaggtgtatcagcaaaaaaaaaaaaaaaaaaaaacccttataaactaataaacaaattcagtcaattgcaaaataaagaattaatgtgtttctatatactaacaacaaacaatctaaaagtgaaatttacaaagcaatcccatttacaatagtatcagaataaagtaccttggaataaactgaaccaaagagatgcaagtcttgctctctaaaaactacaaaacattcctgatcttttaacaaaacttaacctatcctctcaggactctgttaggtcacgggaaggctaatgtggtaaataaacaccaactgagttataaatggcttactggtttgtcttcccacatattgaccaggagtactttaacccaaaggtacaggtaataaggtaatatggactgaactgcctactgatgaaatatttttaaatgaatattaaaaaatttgtaaactgcaacacacaattgctctatctagcataaagtctgcctctttttttgcagaacagcatttgtacaaaattacatacattgtgaggtgtaaatacaaatagttattcttggaaaacctctctgaaattttaaagtaattccatgagaagacatcatttcagatttcctagtgttgcatacataacacgcttttcactgagtctggataaatatggtttgggaggaagtacaataaggaggcagtggaatttttttggatcacttaccatgtgcttgatgatttgcatgcattatttcatttgatctctttcaaactctttcaggtagatggttgtcccattttgcagatgaggaaattaaggctcagggtagtagcattcaggttcactcactgcaaggctggatgtgaagctgtatccacttggcttgaagctagttcttttccctttacacactaggtggccagccagggaattggagtacagagaaaggtgagtagctctgaaacctgagtggggccttgtgaatttaagccgccctgtccaggaaggtttcctgggagagtgaggttgaagaaactgcttaatatccctgaaatggaaatatttcagttactgccaaatgtgtagccaaaaatcaggttaaagtagtggtgaagttaatcttacaggttgtttaactgtcctcagttgcatttcgtggtgtccaagatcacctaataggtcctctagaggtgggcctgggttcctgaggatggcttaacaagcagggaggtagggccttcacatgattttcctctggttcccagcaacattctgccctgatcatcatagaaggatttagtctatgtgtttttcgttcgtttgttttttaaattatagaacaaccacttcagcttgctaaaagggcatctcctctctatacagtgatggtgcccttaggttctggttgtatggggataacctggctgaatgacttgtagatgttctcaagtgtccacagatccttttgtttttgcttaatgtgcccttgctgtcatttattctgctctcctgggaacatcagtacacttgatttgctaaattgtcagctcatgatatatttaccattaaccaaaacccaggcttatgtcatagtatggcaattagtgggagacctatttttttttttatttgaaggtgattaaattcatttagggtgaatagtatgaaagacatgagccctaaaggtatttgcaatttgcatggaattctggcaggtgtcaagtttgactgcattatctggtatctcttgctgttgacttgttaaaactggatctaaaaaaatgtaataatcttttatccctatagcagatctttccattatgataaaactcctgctggtagtcatctgatgaagaacttttccctgtggctatgatcctactgtgtccctacagtacaggcaactcaacccatggtggctactcacaaagactcacagaacctccaggacactgtcagtcctagcaaaaccttaccctgctttgttcccttcccacccccaatggccagttactgggtaattggggtggtgaaaagcccagcgcgatttcctgttggcagtgtgctgatgcaggagagggtatagcccctgggcatggttttggaatacccgggtgtcctctgaccttatcctctgtcctaatgaaaaacttcctggcgtctagtattgcggctctcactggggtcattctgacttaattattctaaaatcaaaatagataataggcagataatggaagttttttggactttctccttccattgttttagcgaaggaagaagacacacacaaatcctccatcccacactcagttctattttggcacctggtgaccgtcaggaaaacctgataaacttgaaagtgttgtttcccaatcaccttcagaactggagaaacgctttcatgctgactttatccatgggactgaagaaagggagagtgtgctcacaagcacaaacaggaaagccttacatcacggagtggcgtggggaggagtctgctcctcgcttgctcgctcgctcgccgcgctccctttgtggcccgagtcgcgcgcaccggcggcggcgggggcagcgcggcgcgtgtctgtgcgctgcggtcgctcgggaccgggaccggggcgaggcgccgcggggctgagcccagcagacattgcgttggcctccgagcagggcgcatcatgcagcgttcgcgcaccggagagaaaactgagaatgaaattgctttggcaagctaaaatggtaacgagagctctctgccttctcccgaggcttctctggtggggaatcttctcccgctttcgctgggcgtgttttggactccctcggagtgaacggagcaatccgattccatacttgtgagctaaagctctctcactccgctttgtattcctctctctctgcgtgtcttctccctttcaaccgtacctactttctcagcaattgcctgtggtgtgtctggggcagatgcatgtcaggaggggagaactttgaaggaaaaagaactgttagtgtgggtgaaccgcggagcgcttctgcgtcccagcggctctttaacacaaacctcaggtttagctggggacatggaaatccagggggtcgctgcacagattttagtagaagctgcctgatgatgtgttgctttttctgcacttgccagattattttacggaaataaaaactttccacccccgctaactttgtgggctccaaaacaatgaggagaaaagacaagcaaaccacttcacttccaaaggagtgaggactcttggcgttttaaacacttgtttgtgtctgagtttaaaatctggtttcttcaatgaccgagccactctaaaaagtacagacttattcttttctttttttctttttctttttcttttcttttcttttttttttttttttttttttttttttttttttttttttacaaagaattatttttcctttcacttaagggggacaagttaatcaggactaatctagtttctttgtaaagaaaaagaaagacttcaaaacaaaactatttaagatatgtgagcaagtctaggagaaataactaaatggaaaagtcaggggatcctgataccacaggaagggactgcaagccaagaaaatctcagcattccctctatcaaaatgtgtcttgtattgcggattgtaatatttattttgaacagcccatcttgtgccctgagtgctgttgtaagcagcaaggcagctgggatagattgtggttagcagagaggaaaaaaatactctttttctttctctttatcccgtccctggcagagctcgattcaggactggggtgaagaggtagaggaaggagctgtttaccatgtcaccctcaaaagagtccagattcaacaggctgccaataaaggagcaagatggctaggggtgagtaaagctggcgagatggtgaactttggaatttcagtgtctgtcgttctgtgaatatcattattatttaacagaggcaggcttttttttttttcctcttttcgctttaaaaaggaaaatgctaatgaccaagtgtttgcactagctgaacaggtctctttttgtatttaatgttttcaaaagcatcttccctaggtttgtcaataattcagaacctcttagaaacatcttgaggtctttggcaaatagattgggggtggagtggcagaaaatgacacacagaatacaggcccagagagcagcactctcttagacaagagccataagcagctttgcccagaagccacccttgtctctctctgccctcccccaattgatgctgtcagcgtctgccttgctcctatatctctaggaggtacccagattgctcaggagacagagcattccaagtctgcatcctttgaggggtggtagatttcctattgtgatctcttttctatatcttgggaggaggcaaatggatgcttagtacccactactttgtgtgtagagtggtgggcctttggaaaaatgctgcttctgtaaacaggactcttttccactgagattgtaaaatattgggtgaggtcatgcaagtttgtaggtatcacctagtagatccttcaacacatcccaaataaagcgaatatgagaaatggaaagctcagcgacaggatcactacttgggcaaatgtcaaacatgtggaagaatgaagggattcttgatctggaaggagaagtagttctcagaccaggcggtgagaggcgacccaaaaagccttgagaaagaaaataatggttggctgaatagagggggtggagtgtgatttcacctggctggccttattttagccgatgggcttcagagtgttgaagatttatgcacttgcatcccatctttagcggcttggagtctctgaaaattcagaatattttgagcagcattcaaaggtggagtgtgaaggaggataggacacaaaattgcacagggcctcctgttaagagtagtggtaacgtgtgacttgtaactccagggagtttaaggcaggatggtggcccatggccggcagcaatcacttcctctgccatgagtctgctgacacaggcattcattgctttgggcttccccagctgcttcagctcaggcctttcctgctactgtactttgggccaaggtatcacccatgagggccagaaattgttaatgacatctgcaggtgtggtctggaaagataggagctttccagtgagaactagaggtcttcacttaccaagtacctaccttactcagaatatgattttaaaattaattatgtatatcactagcagacctgatagggaaagcagaactagagttctgacaagtcatcactttgtttttggtggttgtgtgtatgtattttatttaaatgtggcgtccatgtggtttggcctctagctatttcagaatgattcacaacttctgaaccagttgtcttcaaaagggtcattacatttttttggtatcaggttattcctctctttctaatgagactgactttgcttgggtgactgttttagttttcagccatatacaacattagttatgagtaagtcattggaaatggaggggttcactctgtaggccccacatctacaaactgtcatgtatttagatgctcagagttatttagtaatccccactgactgttctcttcactagacttcacttcttttcttctctctcccttctctcagtgttctcaaatttatacagagttcagagttaattcaccctggattcaacagtagatatgaaatactgagaaggaggataatgtgaaaagattggctctagttgatggaggaatctgtccccctcgcccccatttcaacaaagtgtgatttactgctaccagcctactcctttattgcaagttcctaggggctctccagctctaatctacgtgttttcttgtcttaggtgtcctgttgggaagttctgtttttgtccttgaaaattccagacttaattaaatgtgactcaacccattgagccatagcaattacaaacctttctctttagaactgagtggcttccccatgtttgttttcctgtattccagtaccctttcaaaattcttcaaagtaactagtttcagagttactagagagtggggtcaggtgaggaaattattgcaatatgacaacaaccttctgaggaaggtggtgttgtgatgatctctctctctctcttttttttttttttaacatgaggagactaatgcccagagaggttaaattgtttgccagggtcacacagctatgaagtggtaaacaccagattcaaatccagatggttggctctttgttgtgaagaatttcctgggaccttaaggctgtttccatagtagtagaaaagaacattggctcaaaagactgaggatgctttgggtgtgcttttccctaatgttgcaagactggagagatgtaactttcttttcttcatgtctagaatgataacttgagctgcaaattgagatatttgttgcgaagctatgatctcactgataaactccccattttggaggtttaaagcagggtgcattgaagatatgaagatacgtatgaggttatgtagcatgtgaggataggcatagctttgttacgtgtctgtaatgcttattccagatgcctaaaagatggaacataatttttgtattttctagtattcagatctcaaaacataattaagattcaattttggggaggagagcaaaataattacatatcctcagatgtgaagtattatacagtccaaaacatttaggtcattcttttttattttgtctgttaaattctgtgttcagttgatcttttaaagtaaaactctgtgtttggaaaactacaaccaagtatgtcccaggcccagtttacttgtacgtgcagctgcatccttgcccattgacggtgagattatattggcaactttgaaaaaccaaatattattgaaatactgacccattttccctttacaataacatctttggctgggataattttacccacctataattctcgaagaaaaatgacttcaattatgtcacaaaatttaaaaaatcttaggattggaagagacattaaagagcaattccgagcctagcacagtggctcattcttgtaatcccagcactttgagaggccaaggcaggctaatttgcttgaggctgggagctcaagaccagcctgggcaacatagcaagaccctgtctctactaaaaataaaaataaaattaaaaaattagctgagtgtggtggtgtgtgcctgtagtcccagctacttgggaggctgaggtgggaggatcgcgtgagccagggtggtcaaggctgtagcgagccatgattgcaccactgcactctagcctgagtgagagagtgagactctgtctcttaaaaaaagaagtaatttcacccagacattcacttatcttgtgatttttggaagagcaaagtgtcaaaacttgttatttgtctttggtcccagtgttgtggttgtatatggacagtgaataatatagaaaagagttaagaaaatatcagtatcctctggaagcaggaagtgtaacatttcaggatgaatactcaaagggacagaggaaaagaattcaactgtttgggaagggctttggtgtcagaagttcatgctgttgtcttcagaatatgacagactcagggtccaaaaaacatgtcagcctaagataagttccaagtgaggatattttttttacaagcaagattgtgagtgctaggtcacttctgcaaaatttgtgggcagtggaatgatcagtggttagtcacgtggctcttcttagtcctgtacttctgtggtcatgcagtccttgtggtggggcactgaggcctttctgccctgtgtccagtgtttgtcacaccgtttcccacataggctcttgataaatgtttgtgggactgagttgaaatgcaagatagatgggagtctggtaaagagagggaaatagaatggagaaagttgaatatatgtagaaataaaagaacctagaaacattaggtcatagaacgtggcatttgggcaaattgtggccaatcatgggttatgtggggactgtggtaagataaccatttgtcacatctggattgagaagttgactctcacttggatgttctatttagattgactctacctggcattttcatggtgttgctatccatgttgccttcaaatggcatacagttcctggagttttcagctaatttcacttctgggagccttctctaatcccccagctctggatgaggcgtcccttctgtgtgctccagaggcattctgcgtctcactgttgtgcatttacctcactctgttgtaattgcctgtttacttgtttgttatcttccattagactgtaagcttgcaaccatggccatctagttggcagaaactcaatacatgtttgttgaatgaataggtcatgcctcatccttctttgggggactaatattgtttttataagtatgaatgcatagttggttctcatttaaaacaaagtctacatgaagatgttcacttacaaagaagaagaaaggggcatgggagcaagaaaaatcaattaggtaatgattatagctgtcttacacccattcgagaacaaagcagggcacaaaggtatcaattattcattttaacgaacattccccagtgccttttaaaaccaagaggtccagttgtacttctcttgctgctgaatgttgaagaaaaaaaaggcaatgcatgagttaaaaagcattggctagcattacaattatgtgtggttggaaagtgcaggagtgggattttagaattgtaaggagataagccctagaggagcctttagtttatagttggtcatccttgttttcatctaggaaaacaggcccttgggttgcattatatgtgtctattggaatgtttaatttaggctttagaaagtagatttcagaatttagcagctatgtgtaaatgaaccaactggtatttttaattttgaccttagaaacacgtttttaaaattattaatccactgatagggtagcctctaccaatcaagaaaatttagtaaatttaaattgcctgagatattattacactggatccttttggtgctagtgctttcaaattctgttgggatctgtgttaggaatatgtgacatgtaatcaagaatatccatttcaattcaccaatccagggaatactcagctgagttcaaaatacatgtcaactcccagcaaatacataatggcataaatataagaggcacattaattccttatacttaaaagtgtatattctgttaaaacaattttatgaacatattttattcttatttctgtgaaatcataaagaaaaagcctcttggagttttactcttagaaagaaaatgagagaaataaggtaaatactgtgcctttccactttagagcttagctggaatttgtcactgcccaattccactccctttagtttcctttgcccatggtatatgtgtctctttaagcttcccccttctaaataatcagaattttttgactgtcttacgtattttatgttaagatatgcaaaaatgcactacatagtaaaacattctaatttgtaccatcatattctttttacataaaaaattagtttctataaacagagcaagaaaagttttggttaagtgggggaagataagaaatgttacttcattccaccagagaagctcagctctgtgtctgggttgccaatgggtgtggctatctcaagacgtagagttgatttggagttctttggagattttggcagtttctgggtcatttgctagtaaacacatccagtgtgaactccctcgctgctgttgcatatttctatatgattctgtcatttgcatttgagcctgctaaactctccttccataccattcatttattcatcaaaagcctgctttatgccagacaccatgttaaatcttgagaatacaaagtaaaatactccttgttctagaggaacttacaagtaagtgagggagacaaagttgaattaattacaatatattgtggcaagtgtgaccattgctaggggagcccagaatcaggggcatttaaatcaaatgcgagtgacaggtgggcagtccaggaagcctgcacagaggagagggcccttcagtggagaagtgacggatgagtgagagttaaatgagggctgggacgctgggggccagcattccaactagagagcacagcctgtgggaaggtgtggaggcctgaaatgagacttcccctgtgaggctcagcctggggaagagataagggaacccggtgggaaagggagaggaaagggggctggagagaaaggcatgagtcatgtcaccaagaacctggaatgctaagctatggaatctgcttcatctttaatgttagcatagtcattgaagagttttaagcagagtggcatggtcagatttgcattttagaacaatgactgacagctgcaggggagatgcatcggaagggagccagactggagcatggggacccaggaggaggctttctttagtggtaatgaagtgaagaaagggatgaggacctgactgaagctgtggcggcagagtggacaaggtaggtggggatgagtgtaggcggggcacagggcgaggattcctggcaggcacactggtttcaaagagcaggtcagcaaaaggctttctggagtcagtgttgtcctcttctcactgggtgaaatgtactggggacttcaagtcagccttcctccatatacactagcaaatgcctgcgttactgtcagaaggcttggcagaaaaaccagatccaggcatgcctgatgtgtcatgtctagagacgaaatcacagtttaggctcaccatgaacaaggcagaagccctgcttgacttctcagattccagagaactttgcagagttggtggtttctttttctttcttcctttctttttttaaagtcttctgtttccctacaaaccaaacaaattgaatctgaagaccatggagagagaataaatatggaacctgcaggactatgattacagagttgtattttagaaaacagcagttaaacttataattgtgttgttagggacacaagaaattttatggttaggtgtcctggtctttttccatcttcctacacaatgtgtttaaattctgtctgatactctttatcctagcagctgacattgctgttcttaaaggctcactctgattgctaattctcactccttgtataaaagaaaaatttcagtaagatagaatgcttccctagtttactgctacctcctctcagtctcactcactctctcacttaaatacacacacagcctatatattaaaatgtcttttcacattttattttttaggatttggttcaccttataatgtcacttatggcctcttctatataattgatcaaagcttgattttgtcatgttttgcttgatttcccttaattgtgtcattattgagattgtttgattgactttactcagagaactgcttttagtttaaaaaggaataaaaacagaggaagaaaggaaggactaaaagtagaacaagcttacaacattgggtagaagacaccaccttgtaggaagctcagttagtctcatacagagagagagagagagaatcatgtcatttcccactgatccttttgtcttgtcattgtagaaatacctgtgtctttccactgatgtgactgcatatgtttcccaatgctttgggcctctgcttggcttgtttcctcaaaaccaccttctcctttatgttatgtggcgtatgacttctgaggataacagtggtggtggttgggggtggggtgttgctggtggttctagatcttttttaaactctcacagactcattaccctacattttctagcatgtaattgcttatgccatctgtggtccattcatttgaatttgtttcagcacagttaatctaatcctatgtaaactcccccagaagttttttatgtttttcttttctgcaaagaattcagcaattcaacttttttcccttgtttcctgctgttttaaatactcattttcatcttttataaaaatgaagccaaggctgagtatttccagtttcttaattctgaagacaatttgaaggcaaaaagcaaaccttttctgctaagggtaggatgtcttaggtcagtcatatcaactgaatctctccgcaaccctcttgctagtaattcttccatagttatgtgccattcttattatgcccataacttctgtcactaatggtgatggagctagagtctgtggacaatatttatctaagaaaagaacatttaagtatgtaggtaaaaataactgaaactggattagacattggctaaaaataaaatgctttatagtcatgacttttccaattaaaattgcaatacttggctgagcgcggtggctctcgcctgtaatcccagtactttgggaggtccggatgggtggatcacttgaggtcaagagttcaagaccagcctggccaacatggtgaaaacccacgtctctactaaacatacaaaagttagccaggcatggtggcatgtgcctgtaatcccagctgctggggaggttgaggcaggagaatcgcctgaacctgggaagtggaggttgcagtgagcagaaatggtgccactgcactctagcctgggcaacagagcgaaactccatctcaaaaaaaaaaaaaattaaattgcaatacttgaaattgtttattgagataaatgatactcctaaatagaaaactgaggtaattgaagcatttggttagtttgtgaagcacagggaaaagacttgccactttctgtccaaaggctgattccttctaaagacatgacacaataaacatgtctgttttaaaaatgactttagggcccagagccatcaaggcctggctagggaattagctcagttggggacttcgtagacactggcacctcctggctgcttttcattttcaggggtatgttcagcaggagccctggaatagggaggtagcttagcacagtggtcaagaacctatgctttagagccagacttccatgcaaaactcacctctaccacatgtgagctatacaggcctgagctgtgaagttacttaacctctctaggcctgagctccttacctgtaacggggagaatagcagtgccttcctgatggaatgactgtcaggagtaaatgagttatgtatgtaaggtgctaggatatggtgtgcactcaactcactgagtggtggggctctcgtcagcacccccaccatcagggccctctagaaccctgccatagaaccttggagagacctgggtggctttcttacatggaccccctgaagcttggtgttatatgtaaccccaggttgcttaagaaacagtattagcaaggttttaggacatgtcattaacatccctctctcattttgtacatttgagaggaaggaacaatcatggcagggtttagtaatcctcgtatattagaaataacatctattgtattttatctctctggctccttgcataatgaaagactgcattattcctcgggctccaacattttgcatttgaaattccttcagttttctaaagtaatttgttggtattatttttatgctttaaaaaatattttattacttaacagtgggccatattctgtcttctgttttgccatttctgacagaaaaatcagacagtcggaaacaatttttctaaaaactgcttggtaagcattatgctaatctttcttaataggacataatttaggatgttagtaaattgttcttgcaccatcagtttcaagtcctggactaaactacatgagataaagataaaatttcttactgtgctacacgttgattagcttatacagtgcctgagccccactgcctcagccaggaatgagctgagttgcttgtgaggttgtgactttctgaatcttccatttcctcacctgtgaaatggcgttaatatctgtttttactctgcctatgatttttgtgaggatcagatgagttaatgtgtataaaagtattttttaatatgtaagtttttatacaaatataaggatattcttactgtcatttaacctagaggcctttttttctctctgctcactacctaaatgcttgataggcatgtggctctgtttattagtcttgcctttcttccttcattccagaggcaatcttttctactttgttttcttcccacttgctgccacttgctgattaactaatgagaggtgatgttcagctaggaggagtgcttcctctgctaccaccgttgtccccactgggattccaggtgcatcgagaatgcagacagcaaggcttctgtttgtagattggttgtgggaaaaaaaaaccccatactcacaggattcttaagacaaatgcagtggatattttgtgtttgaaaatgttctatttcttctttgattcttccttttctttctggtacttttaatttgttgtgagaagggtgataaagctaataatgcaccaaggaatggaaagtgcttccatctttgcagaggtcctggaaagttaacttttggtctgaagccaaatcccgatgtaggacttgaactcatgacctaatcccagaggcaagaatgttaccagctgaccaacactgaccctcataaaatgtagacatttaaaatactcctttgagtagtcctgttgctgctttctatgttttcttctctctttcagtcgtttccagcagtgttcctggcctccctgttaggagcacagttttaaagatctatttttctcactgtctttccatttgctgattatagctgcttccttcttgctttccatttctcttgtgtgagttcctttttttgttcctgttccttcctgtccttcttctgacttaaaaatagattccagggtctttggctgctcggccacaaatccgaccttccttctattcatatgggatccccctgagcatctaaagatcttttccttctctctcaagatacttgaaccccagcattcattccctgttctcagctgacttgtggagctaaatgacccttgtactcagagctgtaactgaaaattaaatctctcctacaaagatgcttaataagtgatttacttatgttaagtgttactgacaaacactgaattctccctgaatctactgactgtgtgtggtggtagaggagaagggactctttgtacactgactcaaggcatgcgtgtaacactcgtttttgtgcaaagcaatggtactgtgaccatttgaacctcaggaaccagctttcagacaacgtactgttaagggtatcctggagggacctgctgctgttttgttcccacagaagtgtttctcagggaccgaaagttgattaaagtgtttcctcatgaacattctttggttagagttggaggattatgatattctttacagaaatgacttcctatccaatgttgatctagacaatccacaaatgagtgtctgctcgagggataaaggcttgtaaaactttagatgactgggataaaaagtgctgatgacagcagctctgatttcagtgcccaaccccaacctgaaatcactattatgctcttgttacagcagcagggatgatgatcctcttctcagtggcaaaagagttttaaaaggtttccttccatctggacctccagacataacctatgtggttatgtctccatgaaaagacctggtcctattcttagtagagaatccggagtttttggtttcatcagccatagtgaagttcacatttatgtgcagctctcttatcactgtgtcactgcttatggcattgcatttacctgccctgcttttctgttcactggttgactgatgaatcctacttaaccctttaagttgcagctcaaatgttatctttactcttctacttttcccaacctctcttctggattaaggatccttttatctgagtttccttagcactttaccaaaagctgtattacagcacttatcacactattaaaaaaaatgtttctctttgccctattcgtttcagtgtttcatgaaagggcgggggccatatttaattaatcatcatattcccgtaacctgggacagtgtttgagacatagttagtacttagtgagcatcttataaattgtttggccttatctttattatagaacgtgtatctttagtgacttttttttggtatttggtaatattgtaagttccattttttgaagcaaaaggaaaacattgaagcagctaaatttagcttatattttatactccaactactgataacaataaaaaaaagaaagtgatgcttttgcctcatctttgtcatcattacttgacctacacatttcatgattgtatgaaaagtggcctaggtatgacagtaacctttatagatgggatgacttggaatttagagttaatccatatacttcttagtgacatataggtttgagtcatgggtcaaggatagacctctgggaactcagtttctgctttgaattctgaagttattctacttaggattttcatgtatcttattatatctggtatctgaggcctataattggcttcaaacttgcattgacccactgtcaagccaataaggctttgccctacataacacatttttatgaagggatctgacacatctccatgaacatagtaatgaaggttatgcccataatgatgaggcctgttactctgagatttatgttgcaggcttgtcctgtagtgtactttgtgtggtgcacctttcttaccggaactcacaggcaaaaggagacttaataagtgacataaattacataatattttgggtatacttttacattttcattagtacaactcaattcccttgctctctggccctccgacacttttctttattctgtggttttacattcttaagtttgaaattttcactttaggcaaaatgtaaagtttatgcaagaggttttcagaattctagaatttcagaattctgtttttaggtgctttcatttacattgtcccaaatgtaattggctccattaaaattaagtgttctgatggcttctgaaccttcctgcatgcttccttgcctttttctttgcatcggtgttcaatggcataaatgtttgctttagaaaagaaggatggacttttttttaaagcaatgccattcttaaaagagtgttgaagcaacattatacttttttttttttttttaagagacagggtcttgttctgtcgcccagtctggagtacagtggtgtgatcatagttcactgcagctttgaactgctggtctcaaagggttctcctgcctcagcctcccgaggggctgagactgcaggtgcacaccaccatgcctggctaatttttaaattttttgtagagatggggggtctcgctatgttgcccaagcttgtcttgaactcctagcctcaagcgatcctcccaccttgggcccctaaagtgctgggattacaggcgtgagccaccatgactagcccattttgttttgtttcgttttgatttaaagaagaagaaaatcatctataattctgccatgataacacagttcttttcacttttacttattatcttccaatttttgttcacaggcacacattttaacatagttgcaatcatgctatctattccgtttgtgataggcaggaaatatttttcagaacaaattagaaaggttactttctaatttgaatcgtttgtgatatttgttatgtttctgatgccacagacaaaagaatgtatttggacttggtgtttgaggagttttaaggtgataatgcttatttattggttaatgagcctcatttctgttttttacccccacgaaatctcccatcctgtatcaggggtgtggggcttgcatgaggaccctgatagcaccatatgagatgagggcatgtgacaaacgtgcagtggaattcagctggagtggatggtgctctttccttctgcttctagacatcattgccactctcttgctctggaggatgtgggtccagaactctctaggcctgtgctgttcaatatggtaacaactagccatatgtgcctattgagcacttgaaatatagccagtcctaattgaaatgttctgtacctgtaaaatccgcaccagagtttgaaaaaataatgtaaaatatctcagtaatttcctatagtgatcacatgttaaaatggtaatactgtgggtaaaatgggttaaataaaatgtatcgttaaaattaattttatggctgggcgcggtggctcatgcctgtaatcccagcactttgggattacatacaccaggctgaggctggtggatcacctgaagtcaggagtttgagaccagcctggccaacatggtgaaaccccgtctctactaaaactacaaaaattagctgggcgtggtggtgggcgcctgtaatcccagctactcgggaggctgaggcatgagaattgcttgtacccaagaggcagaggttgcagtgagctgagattgcgccactgcagtccagcctgggcgacaagagcgaaactccgtctaaaataataataataataataataatacttgtacctgtttcttttcaatgtttttaatttggcaactaaaaaattttaaattgcctatggctagcattatatttctactagacaatgttgctctcaggccttacttttcaaaatgcagcttgtggtttatttgtgggttctgaagtcagttaggtgggctaaaaatcaatattttaaaatcagaacagaatggaatagaaaatattagaatgtcattattgtaaaactttttgtttaaagtatgcatgtgtggactggatcccatgtaaaatgtattttttctttttactatgaatcatggctaaaaagtttgaagattagtaatctggggtggcctgacttaatctgaagcattaccaggaggcctggtctgctctgtaagagggcaggttggtaccaggaacactttatagattttaggtctggttggtaaaagctattctgggactcttcaactagaccagaccctgcaggaaagtaaacctgaacattagtgctcatcctaaaagcagtggccactcaggagacttccagagtgaagggtgaactaaggatagcttactgaaagctggacctgtgtgctcaaccctaaagtgtccctggagtccaagaatgacttttgtctggttacttgcttctcggagactttttcaaaatggtctcatgagtggtgatactttctaagaagcaggatgatttcctaatgaccttagagccaagatgaattggacagggttccttgtgaccctcaggtcctccctgcatcatatcctgttgaaatcagaagagactgtattctaatctagaagcatgtctgtcttcttcctgcctgacagaaaacatgtccttacagtacaaaagatgtaggggtggtcaccagagctgtacttttggctgggttctaaataaatgacactgtaagccacagagagaagggagaaaaggctccaaaaatgaagtttatggggttacatgggccttgtatttattctgacagttgtaaaaattcttttgggctgacccatttttcttttcttaattaaaaaaaaaatatctggcaggcaagaggaagaaatgtaaaccatgtgactaatgcttcagctttttctcctggagccagattctttaaaaattataccttagacatgtttgactttttaaaaacaattgcccacaaaagccaccaaacattttttttctgaaacttgtagacttagatagcattcattttcaggaaggaatccaaaagtacaatatttaggagttattgaaccaaaatctcctttggagattttgccctggtgaattagattaccctaggaattggcagaggaacaggcggccttttgcctctactttgcttgagtatttccagtcctgttggtagccacccaaaatgtttgagggagttagactaaaagatcgtcaaggtcctttgtagacgaaaagtactatgactccagtgacggaatgacatggcagtcaggagttatgtttatgttgacctcttgttttatacttattgcaaacaatttgtttgtttactcactcactcaaatttgagcacttactatgtgccaaatgttggcctttgtaggaaaatcataggattttagagcacttatcatagtagatttgagggcttcaaagtcaagttccaatctccctttctggggtgatttcctatgtctcacttttgcaactccacacttcagctaactgggctattttcctgttttagggtcttttctcttgctgttgccagggtctaaaatgtcctcctttccttaatgccagacatctttaaatcgccagacatcactcaaattctagctcaaatgttacttctgtgagtcctctctggtttctcaaaaggtagtaagtgattcttctctcaagccaaagcactttgtacttcttttttttaacaccacacataatcttcttagaatgaactgtatgaaatcaccagttttataagttaaaaatggttaaatattggcagcttcatacagttccagctaatattaactgtgttattgtatggaacttaaattaggcctctataaatatattgcccccaagacttatagccagaaatattcttttgtcttttcttcaaaaatatgagttattattaaactaagtttcattaaacctgtgcttgcaagtttcatttaaaaaattaaatatagaaaatatttatttttaattttattagtcttagctaatcatctaaaattttgattcagtaaaccaatgtattagctataactttcagtgtagtttaataaggttctgtataattatctactttatttgttaaaatgatttattcaacatggctaaacataaagctctgtgatatattgctggagacattccccactcccagcaatactcgccagttaacatttttttcaccattcagtattccgtgacatctgatttggatacatatctaggcaactctacaattattcaacttacggagttccactgtagctatagagatctcaggagagagttggtgggatagttatttgaagtcaatgaatatcatgtctgtagcattccatgttacctgtatagaatcagagaaggatggaaagttagtttgatatgattttttttcttttaatttagagacagggtcttgctctgtcacacaagctggagtgcagtatggtcatagcttactgcagcctcaaacttctgggctcaagagatcctcctgtctcagcctcctggatggctaggactacaggcctatgcaatcccccatggctaattcttttaatttttttttagagatgggccttgctatgttacccaggctcatctcgaactcctgggcttaagtgatcctcctgctttggcctctcaaggtgttgggattatgggcatgagccactatacctggctgattttatttttctcggtgattttatgttagttcctagtgatcgttgcttacaaaccaaatctgggattttgggaacatttgttggcagaactacccatccgttgttttcagtctaccttaattgctgcctaaaaattggtataccttcttgtacaccctttagacaccactgtgattctaatttctgtgaagattccgctcatcacatctgcttctccttttagtgtccttccaggttatttatccggccctggagacatgaaatcacttgaagggctaagtgctttcttactatcaccttctctatcttgggctttagtttcctcttcaccatgctggtcctaccctttccagtttgaagatcattttccttgatagggaggatagaagcaaaagaggagtgaagtagttctgctttttctttgttatcagttaacattaccccacctatcagcaaccactgccttcctatttttgctcctagaatagctgaaaaaagtccttttacttgaccttaacaattttgacaaggctcagttcattatactattcactttcatgttactgtgttttataaatatgtgttatcctaagtatatgtatagctttaattatgggacctgctttctatcttttataatttggaaaacatgtacaaccaccttgatctctttaggtgctttctttcattgcatattttaaatatttgtctcacctttcttgaagcctcttgcctgttaaagaaggtttatataataatgctttcctaatgtttgggatacatgtctgacacctgtacaagaaatgtaatcaccctccgccaaggtttctatatatcctgcagcaaccatttttcataactgagcataattatgtctggactaatagttatttttatttcctcctatcagtagagtagataaaaacctagaagaaagcattgatagctattggtgagtgcttatatactgagagggaggagtcaaagataattccaagacttttggtgtatttgaacaaagagaacagtggtatcattagtagaaacagggattctgtgaagaacttctttgtggtgctggtgggagggtagtgatatagttatttgaattttagacatatcatgctggaagggtttctggattagaagagatttgggattagaggagtacatttgggtatcatttacacatcagtgatactttaagcagtaagaatgaatgatatagagaaaatggaaaataaaagagtattgcaggccaagtgtgagtaatgtcatgttcaggggaccaaaaggtagagaccggttagcctaggagtcagaaaagcatagctagggaggtagcagcagtaacaggctaattcattggcacagactttaggggaggccaaagttttaaatacataagactgtgtactctaaaaacaagtaacatcctgtcacttttggtcatttcagctttccaaagcatattttaaaactgaacattaatgaaaagcttctctgagtaacccaaatagctctcatcccataggaaaggccaggaggttatcattcttaatgcatatcatatcaattctgaatgcataacaaagttggttgtttatataaagtcataatgaagttccttgttccagttgagtagaagtagcaaatctgaagaaagtggggcttttagaagcagacacactcatagcaacaaaaactgacaatcccagtggaagcctatgttcaaatgtcaccttcttggtaaggccttgtctaatcactcatataaattgcaaccatgaaggccagacgcagaggcccacacctgtaatcctagcactttgggaggctgaggtgggaggattgcttgagcccaggagtatgagaccagcctgggcaaaatactgagaccctgtttctatttttaaaatcaatcaatcaatcaatcaatcaatcgcaactctccccatctctgtctctctctttttttttttgagacggagtctcactctgttgcccaggctggagtgcagtggtgcgatcttggctcaccgcaagctccgcctccctggttcatgccattctcctgcctcagcctcctgagtagctgggactacaggcgcccaccaccacacccagctaagtttttgtatttttagtagagacggactttcagcatgttagccaagatggccctgtctctattttttaaataaacaaatctcaactccccctaaccctgcaactccctatcctccatttcagctttacttcctccttaacaccactgtctaatatacctttttatttgttcatttgtttcattgttattgattgattgattgctgcttcgtacattagaatgtaagttccatgaggacatgggttttggttgtttttttccccctgctatattcccaaagtctagaacagcacctagccgatggaagacacgtgattatttgtggaataaatgcatgtaagaagaagatgatgatgaaataccaggcataaaaataagaaaagtgtataggtatatagatcatttagctttggaataagcacttctatttatgtcagtttctctaggggaagatactacagttcattgtagcactgatggcctactgagctgtaaatgaaaggttaaactgtgctccggatgttctgcttttgaaggcagaaaaataacatatttcagtaacattttaatcaaataaatgaaacttttagaatgttgatgtttaaagggtccctccttgggaaaataattcctgtattgaacactaaattctcccatgaatgaccattattatgtgatttaaatgtacctttttttttcttttcttttcttttctttttcgagacagagtgtcactctgttgcccaggctggagtacagtggcatgatcttggctcactacaacctccgcctcccaggctcaagcaattctcgtgccttagcctcctaaatagctgggattacaggcatacgccaccatgcccagctaatttttgtgtttttaatagagtcagggttttgccatgttggccaggctggtcttgaactactggcctcaagtgatccacctgcctccacctcccaaagtgttgggattacaggtgtgagccactgcatccggccgtgtgccagtttcttaaaatttgatttttccttaaccttattgacaccctgaacaactttcttgcaggtccactggaaatgttaaacgttttgcctccttttttttccagtctcagagacctttaacccaaaggtgtggaattaacccaaaggtgtggagctacagagaaatatatggcagctaaacttaaaaactgttaaactggaatctctcccactggttttgctttcacagactgttgctttattgtaggacgtcagtggcctgtttgttactctcatgtctttttggcaaaatgaatgagtaagtgcttctaaattactgtgagatgcctgtcgaattgcataagtagatttgaaaaatgctgtattttcgattaaggtatagctgcaaagcatagctcttcagttcaagaggcgtagcctgacctcctacacattttacccttctccacagttgcctcttagtccttgaaaaaacatttttttcttattccctctctttcattatttacgttggatacaatagctgtgtacgctatttccctggctcaatataatataagtttttaaactttacaatctatggtagtgactgagaaaaactttttaatgtgaagggaaagtgtccccactttaattagaatgacaaagcagtatggagttatgtaataggtattcatgcagctccattggttacataatataatggtcactcacaacagatacttaaatccatttcacatccaggaccattgtgtccacttgcagagacagtgctttctttgttttcaccaaataaatagctagtgattattagcttagcttttaagttaaatcacattcctggaaagggaaatgttgcaacttttttttaataggagaggagaatgcatttttgaaaatccaaacatactattactgccagtgatatgaccattacacctctttgacaagagaaacctatgttttatttaatttagacagttataatttcacatagtcacatgacctttatcctgttaatatgcaatctaaatatttgtcttcaaacggtttcagtaacatggaacagccatgacttaatttgcctacgatgatgtcttttcccttccagcaccccgtaagtggaattttgacttgttgctgagtttgtgatttatttacagcatctgacatggagtaggtcttaactacttggcatgtgtggagtgggggtagagggcagcacgtggggatgtcttcagtgagcaaatggggggcctgacctactcggccgtctggtgctgctccttccgtgaggctttggagtctgagggatctgggttctgtctttcgactcttggctctgtcaattactagtaatgtgaccaggtggattgcttgtcctgtttgagcctcagtgtcctcatctataaactgagattattgtgagtatcaaatgagattgtgtatttaaaagggcttcgaatattagacacaaccaaagataatgattcccaatctgaaatttactagtcaaaaatgaacttgtaacactgattgacttctgtattcatttcctctgatctgctccagtcaggaacaagttaaagcaagtgtatgcttctactcggaataaaactggtatcagtcaatgacaatggaaaaagaataaaatttgcccctttctatgggtgaggaagagagttggagaggagaataataacactgtgctcagtagaagcagatgactttacttcagtcatggtttatttcattttgtcatcataggaatttctctaatattgttaccatggttcttaatcatcaatgcttgttataataaccgggattgaatgcaccttcttcagttacagggatttggatttagggagttggaggtggggcccgtgaatctacttttaacaagtaccccaggtgattctgatgaaggtggatcagccaggcatggtggctcatgcctgtaatcccagaactttgggaggctgaggcaggaggatagcttgagcccatgagtctacctgggcaatatagtgagacctcgtctctatgaaaaaaataaaaaaattagctgggcacaatggtgtatacctgtagtcccagctattcaggaagctgaggtgagaggattgcttgagcctgagaggtggaggttgcatgaaccatgatcatgctactgcactccagcctaggcgacagaacaagaccctgcttaaaaaaaaaaaaaaaaagtagatcgtgatcaacatttaggaaattttgctcccatcactgttgctttctccagtagttttctaagtgaatcttttctttttttcatacagttcattcttcatgtaaactcattcatcatgatatactcatatttacacttacatttgatcctgataatacccacctgcttaaaaccctttaaaagcttcacattgatactaagttgagtatcaaagctcttctggctgagcttccaccactctcccttggttcactctcctttggccacatcaacttctttttatccttcttgtattccaagttacttcatggcatttgcacatgctgttccctcccctgaaacgttctctctctcaccatttatctggtgcacacctactgattattcccatgtttcctcgtgaaatttatcttatatctaagacaaaacctgatcctctcatgtttttaagcagctttttatagggagcaatggtttctaccgccattagacagttgttaaattatcttctctgcttgaatgttggcttcatgaggatagggagtgtgtctgtgttgttcatttctgtatccacagtgtcctataatagtatgcagaatatagtggaagctcaggaaatattctgaaaaatgaatgaaaatgggatttgtggcaaagaagtgatgctctagtcctccacttatgaggatttaatgactgatgcagtgagtgggcctttttataaagtggcaatgcgcctaacttagcattctagaatgagatgtttatttcagtgataaaaacttcttataagttcagacacctcaaacaatatcctttgtgttcaacgcttagaacctggtatgggaaaaaggggaagttataaagatttcagatgaaatcctgacttattttgcatgacatctttcatgcagaaagtattggaagctgcttggtagtccaatgcctcacaagtaaatttcttgcaatgtatttatttatacttatatcacatagctggttgattagattgtgtattcatttcctcagatactcccacttggagtggtaaaaagtcaagtaagtgcatattcccactctctgttttcgaagcaaacagttggcccagtggcatctacatcagatagaacaataagagcaatgtcagccccagagaatgagagatctttgttatgtgtagcttgattcagcatctcaatcttgttgggaaaagaattctggagaaaaaaaaacccatgacttaagtaatttttaaaatcatgataaccaaatatagaattaattggtcttcaaaaaaatctcagaacagtcattttaataaattcactgcagttctcaactgctatgaagagatgggaccagttaattttgtttacttgaaatttttagttcagaaaaacagatttttgtatttttcaaggtatccatggagtttcgcatgcattgaattcagatttaaaaataatatgcaatttacttacagtattactttgttttccattcattaccacaaatatttactgagcatccattatgtagtagacattattttatgcaccagagacacagtggtgggcaagacagttaagggctctgaacccatggagtttacaggcaacaaacaagtaaagaagtcagtactatcaataaattagtctagataaggtaatctggtgtggcaggggaagatgggaagtgtgacactgaccagaggggtgctctagggggtttatctgagtaagtactgcccaatgaaaagaaggcaataaggagccagtctgagaacatgctcaggctgagcagcatttaaggcagatggaacaaatgcaaagatccttccatgagaatgagcttgctgtgttttaggaactgaaggaaggccagtgtggttggggcctagagagggaaggagatggttttggtagtgaggtcaaggagataggtaggaagggctttgtgaggtctggcagaaggctggatttcatttaaaggattatgggaagccagtgggaggttttaagtagggagtgacaccatctgatttgtgtttttaaaagatcaccatggatgccataagaacaatttaaaagattgtttattttagcagtccagctgagaggtgatgatcaagcattacatgcttttattgtatatgtacagactttatatgtacatatttttatttgactgaatttggaagaatcaagtaaaggttatttagggactataataatgtcactagatagattcattacattagaaacatatccatttaattaatattcatgaagagcttattgctgatttggttgaaggccaatttctagagatttaaatatgaatagtctttgctcttaaaaattttacagtctagtgcgggatacctataattaaataaatacaacctaatatgggaagtatatggctactatgaataaaactgtaataaatgtttctggccatgtcttttggtgggcatatacactcatttctgttgagaatatgtctgagtgaattggtgaattataggataggcatgtcaagctttagtagcttgttggactttattataaaagcaggatttgtactttagaaagatcattttgtatatggatgagtggttgaagtgataagactagaggcaagtgagactagttaggtgcctattactcatacccagttatggactgagatgtaaattaaggcaaaggcaatgaggctgaggaatgagaatgaagtgggacgatataggagatggaagaggttggattttggggggatgagggagtaaggatgatctgtacatttatgacttgggtcattaagtcagaggctagaaaaggggtgagcttttagaggaataaaatgaatttccttatgtatgtgttaaattagagttgtctgtgaattattcaggtgaatgtggtaattggaaattcaagtctagaattcagaagagaagtaaaagctgtagataaagctttgggagttaatataatatttgtgttaggtgaaactctaaggatatatgtgtgggatgaccagaaagagtatagaaaaagaggaaagaaggttgtggttagaaatgtttccatattgatggtaagtgaaggatgaggaactgttgatgagcctttagattcacagaagatttttgaggaagatgagatagtgtggttaagtctgactgtgggtccagactgcttgaatttgaatcctggcttttctgcctcttagctgtgtgacctggaatgagtcacttagcctctctgggtctcagttttcttatctgtaaaatggggataataaatgtatctgctttataaggttattataagatatatacaaaatgcttggaattgttgttgttattgttattcttgagaaaatgatgtttataaggaaaaggtacagagtttcaggcgggaatcaatagtgccgattctccagggatatcacaggaggtaagtgctaaaacatttccataggattgacaaccagctggaagagtaatgggggcagaaacaaactctgtaggctaatcataataccgtccctttttgtaggaacacctattgaatttcataacataaacacacaagcaagatcacatggtttgcttgaaagcctctcaggttattgacataagtgctagtaataccttagtttaatatatagttctttaatttaaagcagctcaaagtgtatcctgtgttcttttgaatcaccctcataacatcaaggtgagttaaggaagatgaagataatattcttagtttacaaatgaggaaactaagactaagagaggccagatgactttatccaagcttttattaatcaacttctctgttatcccatcaataaaccctagtcatccttgttttcacattgtcaagcatagtatagctcaaagggtaatcaatagagattctgcagtttagaatcacctaggatgctggttaaaatgcagaccacctagcccttgttctgggtctactgatcggaatctctggggcatgggctcaggaatcagtttctgcccagcactccaggtgaatctcttgaaaaccctttagtgtatttaagagaacaggcaaatagatccataaatgtatcttgtttattagtgagatttttcacaaaaaagtgttaaaatattttgtattcagaaactcaggctactataactaaaaccttagaaccttgttctgaacatattgtatgatttgctatatttttgcagttgaatagtacttttggttaaaagtaaaactgatttgaccttacaaatgaataatagaatccattggtaagttaccacagcactgctggagaagtcacagagaagctatggctgaggactctattttatatcgattcggttaatggccctacctgcagttagtatttttagttatatagtattgattagaaagagttgctccccctatatttatagcttcagtatgcatatgatgatgaaatgagccatatctctctctgtttttttttttttttagcatagcagcataaaactctgaggctcaggtagctttgaagactgtctctaggaggtgggacctcataagagtctaggccaggtctaggtggtaaaagcctcgtgaatttactttcttatttaattgtagaggaggtgcatttatctgtatgagttggcgtcttatctgtctattaatttgttgtatctctggcttccagcagccccatagtaggaactcaacaaatatttgctgaatgaatgtatctactcaagtgtatttaggaacaaacaaaaacaaccaaatcaaaaggaattatcctagctcactaccgagatagctagttctagaaagcactagcaagtagctgataattaattgaactggaactagaaacagagtctagttccttgcccaccctccccttcattttttcctgactgccacctttatcattgaatcctaaggttgcgagaggccttaccccatcagttctgcaactccctctgtgaggctcctgcttatttacctggcatgtatttaatgtctatggcatatgcactagtactaagctctgtacccctttctttacacgtcattaaatgaagaaattcacactcatcatctctaaggtttttagagagtagaaattccttattccttttatagatttccttagtacctcatttgagttcttggcacaatggaggctcttctctttttattttgtattttttttatttttagagacagggacttggtctgttgcccaggctggagtgcagtggcacaatcatagctcattgtagccttgtactcgtccgttcaagagatcctttcacttcagcctcccaagtagctaggcacatatcaccacacccaggctaattttctaatttttttttacaaacagggtctcactatattgcccaggctagtcctgaactcctgacctcaagcgatcctcccacttcagcctcccaaagcactgggattatatgcatcagccaccatgcctggccaaagcacttttaatactgttttaatgactgataccaagagcgggtcacaagccatggaaatgatgagcatcttcttaggaggataaatattttcttttcaaacaaatgcctatctttttacataaaattttgatcattaatatctagtaaacaaaatgtttgctttcttggtttctgttcatttggacaaattggatctgtgtttttttgccagctaccaggcctttctatatgctactttcttctttaaatgtttttttacaagtcagaatttataaatctgcccttttgtctggctgtatcccataatcaatcatattgtcattctgctttcatttccctttatttctgaaaatagaaggaaactgtcttttgactagagagtagatctctaaacctagcaggtaggaaaattatttaataatctggaaatcagagcagaacacgagtgctttccatggattcccagtctgtattacccagtagtttctcatgcagaagccagcttctcctggctttccttgagcccttgggttaagtcattcatccatctttcttagactcttagactaaatttactcatttaagaaactataataatgagagggattttgtttccccccaaagagagtctttggcactaagacgttattttttgtctttaggtgttaaggatttcagtcagtgtcaagaggtaagaaggataataccagagataataccagatgtaatcagacttaactttgggtgaaagtagttggtgtaggggaaagaaagtgaaaagtatttgtagagtgctgaatagcttgtaatctttcaacatgccttagatctattatctaactttctctttcttacaaaaatcctatgaagtctgtagattctgggcaattgagttctgataattcttgggtgtacagatatggagattgagtacccaataccgtattgctttgtgtttttagggaatattccatgattgaaagacagggctggttttatatccttgctttaatgcctatgctaattggctgggtaactctgggtgtgaccccttacttctccaaacctctgtttccttaagtgggaataattcctacactacagggttgttgtaagggttgagcatctaatccataatgtgcactcagtaaatacaagttagccttctttcttcatttacagtctaagaatggttttcttagaattaatgtatagcttatgaagaagaaaacctattaagaaaaaaagccagtttagtgtatcttttcttttcttttttttttagacggagttttgctcttgttgcccaggttggagtgcaatggcgcgatctcaggtcactgctacctccgcctcttgggttcaagcgagtctcctgcctcagcttcccgagtagctgggattacaggcacccgccatcacacccagctaatttttttttttttgtatttttttgtatttttagtagagatggggtttctccatgttggccaggatgatctcgaactcctgacctcaggtgatccacccacctaggccttccaaagtgcgggaatacaggcgtgagccactgcgcccagccttcagtgtatgtttcaaagaggtatactcaggatacacgcaactgtttttcatagaactttgccctaggtttgatcacctaataacatgcttgaaagacacctggtgggtttatcagtagccaattctagcaagcccatgatctaggaatattatacgtgccaaaaacagtgctgagggatagaatacttgccagagacactgcagcccagaggtttgtgagtcataaagctacatcttacatctgaatttataagtccacatagactttaaatatttcattttggaggggaagggatcaaactaaacaacgtcattattacttgaattccgagatccaggggagtaataattttattgtcattttggataatggggctttggtttttaacattacaataataggtaatcataacagtgggaactaaatgttcccataggaatcgcctaggtagggaaagtgcagaagattccttaatgtggtatacggagtaagaatcaaaaattaatgacttgactttaaagtttggaaacatcagttagttgctacccttccccgtactctccctggaggattggtgaaggagcacttataaatctcacaaggagataaagccccatggagctgtctgtgggatttatggcatgctgggaaagcttctgggctgtggggaagcctctccattcatagcaggcttcattcacagagaatattaggtcacacagaagctcactaccccctgctgacctttacagacagagattggttgggctgcacaaaaacagaatggactcaagcaagccagggcacctgttaacctgtgaccttagtttatgaagaccttggacatttgaggctctgaatgagagaaaaaggagggagctatgaattttggaagttcactctggatactaatttgtatgtgacaatttgtgatcttatttggcaaatgcaacagtgactattttaattcaaactcctctccctccgtgcaactcttaaatccttgaacttctcaaaattgcattgatgtattccttttataaagtaggtaacgaagtcattgaaactaagtttttgccctaggtccgacagtaaattggctccaaatggaaatgcaacctgttaattcataacgccttagttcagcagtccccaaccttttggcaccagggactggttttgtggaagacagtttttccatgaacgggggttgaggggtgttcgtttcaggatgaaactgtttcacctcagatcatcaggcattagttagattcccataagaagtgtacaacctaggtccctcgcatgtgcagttcacaataggcttggcgctcctatgagaatctaatgtcgccgctgatctgacaggaggtggagctcaggcagtaatgctggctcacctgccactcacctgctgctgtgaggcccggttcctaacaggccatagactgctactggtccatggtgcaggggttggagacccttgctttagttattggcattctgagtttcaagcagaaaagtatcagatgaaagtgaaattattttatttgaaaaatgtggtcggcaaacttcttaaaatccacttaatatttaaatttgctttctgggaaactttggaatccttaaaggatgaccagaatgtcagaaatggagatttgtgttagagaagatagaatctgttatggattaatgttggaccaagactccaggagtactactctttttcaggagatgagaaacacagcttcctgtttccttcaggagggttcctggactctatctaggaaaccctactgagacaggatggcaaagggggatgggatttctgtgtgataaaacactagctattgtttgttattacagctccctttacatcttcctgaggatgaaggatattcatcatagaagcctgaccacgtggcttcattctaacaagtggcttcaagcaaggtcaactcttggggctcgtgtagttttttcagagcacattggtttgtcatacacatgcccttctgcctctcctgcctccacatttctactttcttcatagttcagaggtgtaattcccttcttctatcagataaagatcatggtgacaacacaaataccttaactggaacgtacacagaaagaaaatgtctcagccagtgtgaaggtgtctcttgacactgacacaatctgagagggacttctgggcaggggtatgctgataaactggccctccaaaataaaaaccctaatttgtagcattgctaattttcatggcgtaaatagtgtcaccatgtctgaactcacactaccaacatgatgccactgaatgcagaggtgaggagtgtgcacatttggctcgtgcaagaggttcaagctggctccagcataccgctgtctaagccttgatatgtttgtataattagagggaaggtacatatgtcagcacatatgtgaatctggtggtgaagatttcttctggtttctctgcccagaaatgccatcatagatcagacgatgtatgaatttgccacatgtgcaagtgcctcttctggtgctgcccatctttactcttggaaccagcttaattttggtactcatccagataccatccttagcctactactcttcctattttaattgatgtaatttctacatatttccatcttagacccttctcccaacttttagattctaactgcctgttggacttaccattggcatgtaattcagtacctaacccaccaaaatctgacttcctcccctcaattttctttcttataggtgacaccattacctttccagccatccacactagaaatcaggtgaagtttccagattctttattttccttcattttattctctacatccaattgatcagaagtcttgatgatcttctttttgattatttgatgggagggtaaatgtgtccctcccatctgccaccttctccattcctattattgtactagttaaagcccttgcagttgcttatctggaatatccacaactttcgtactggtttttccaactttaaaactgtcctcatcaaatctgtcctccacgttgatttccttgactatgcttaaaacctcatcattggtctcccatttcaacaggacacagagtctcagctccttagcatgcaacctaagtcctccataatcaggtagtctcctgctggctctccagccaaagcattccttccctctgtcatattgtttatgcagccacacattttccccctgtagtggtggaaaggtatgatgcctttcctcacccatcataagggtcatcggtaactctcctataacaaaagacaggttaacaagagaaaagcataacagatttctttaatcaaagttttatgtgacatgggagccttcagaaataatggcccaaagagccagaggaaactttccatttttatgcttagagtcaatgaagaatggacagccatgtggaaatgtgattggatgaaacgggtatgatctaatggtaatagactaagggggaacccagcaaggcctgtctgttcagattcttcctggccactctttgtagtattcttctttccccctgggtgtgggccaggacccctatggaatgagggtcttatgatctactatcagacaaggtaggtcagagaatttatggtcagcttctaaacaaaaaggtgagggaggttagagcaatatttccaggctttaagccttgctttaggataagagggggttctagtttctatgactcaccttgggaaggaggaatcctggtttctatgattcacttcaagggagaaagaagtgtaggagacaggagggcaggaaaaggtcagagaatttgcttctgaggctgcttctgaggccttccaattcctttagttcaaagtcctcagcatgtcaaagttccatactttgggatagcgttttcatgacttttttaatgcttgtttctctgcctgctgtgccctccccaacatagttaactctcattcattatgtgaaacccagtgcaggccaggtatggtggctcatgcctgtaatgctagcactttgagaggccaaggtgggagaatcgcttgagtccaggagtttgagaccagcttgggcaatatagcgaggccttgtctctaaaaaataaataaataaataaataaataataaataaataaataaataaattagctggggtggtgcgtgcctgtagtcccagctacttgggaggctgaggtgggaggaatgcttgagcatgggaggttgaggctgcattgaaccctgattgcaccactgtactgcggcctgggcaatagagatggactgcatctctaacaaacaaacaaaacaaaacaacccagtgcagacagaacctacttaagaagccttttctgacacctcctttacactgggcccctcttggtgcttccctccatgtcttgcctctctctccaccattttactcacattttattgtaatggtttctttgtgtctgtttccttcaccagactgaacaacttggttgccagaactgcatgctatttacctttatatgtctagtaccttgcacagtgcctggcacatagtaccatttagttaatatgtagctgaataagtagatgaataaatggaaaagacagccattgtgtatgtgctagtagcataaaaatacaggatacacaattacatttcaaattcagataaataacaaataggtttttttagtatgcatagatcccaaacatggaatgggacatacttataccacatagtatgtaattattcattatttctctgaaattaaaatttcactgggcatcctgtaatttatctgtcaaccctaacctagcaaaaaagtgacttcccacccaatattaggttagcacaaaggtgattgtgacaagttttggtttaagttttgttaagtttgccactatttttaatggcaaaagccataatcacctttgcaccaacctaataaaagttcacacaaggcagaacctcatgttgagcttgacatcatgggccctaaagtattttctagactttaccttaacatctctgagtgtcctgtgtgtaaatagtcactgtagtactcaggtgtattggccttgtcatgttctgctgggtgtcattacatacatgatttctgctgagagaatgatgcaaattttgttgcatggcaaagaaatttatgcagttgagtaatatggagagatgagcagagcttatttgtgagtcagcttgtgggttttcctatacaggtggagtatccttaatcttaaaaccgaaattcaaagtgctccaacatccatgcttattgcagtgttttgcagtttggattttcagaatggggatacttgaatggtaagtatagtgggaatatttcaaaatctgaaaaattctgaaatccaaaccactttcagtcccaagaatttgagataaaagatcctcagcctgtattgtggtggtttgttgttgctggatagtggttgtagggcatatgaaaaggaagcataaaacttacttttggtgtttggggatgaatgtagggattgggtgtgggttttagatttttggagggagttaacagctggaatagtactcactatttactttgctgctcaggccaagatgcctgagaactgatatactgaagagtgatcatggtgtggaggactccatactgtctccatcctaatgaggttgtttgcttaacacgttccctgttaaactatcagatgactgaattattattttgattgaagggactttttttttttttcaaattagaaacacccaactggttaacagtttatgttttagaaggtgaaagagtttatttttccatgactggaaacggaattgaaatatggcatctttcatctctcacatgccctttttcctctccgtctcatgccaaaatcgataattatggaaattacctggtaggacacttgggcacagttttagatatttaccccataggactcagacatgttctcttagaaaaagctggattctaaaggcacaaagatcaaccaaaaaaacaaacatgaaacatttttgtggtcacagtaccgtgatcttgtcagtaaagcgacggtctatgattaaatccagattgagctgtttcctgttagcgtgctaacccacaggacaggctcaggcctccgtgtcttgctttctaagtctgggttattaagcacttgtctgacaagggttccacccctttcgtcttcaacttaataattcaaagttactaagataatataagcaaaaacaggtcctaaagtctcttaaaacacttacagacctataggaatcttttcttgcaaaaatgaaacttttaacattttagcttctcttgtcgggccatatggcagagtattttttgtgtttcccctctgtacagtttcatttcaaaataatttcagtggtaagcagatcattttaagtttttgtttcataagaaatgtactctatttgaatgttggcaaattagaagtcatcagatctttcccctgccataataagcaggtattaggatatttagcagttctacagaaaatgacattaagcaaattctctgataacttaacatgcattgttattttgtgtgagaatgattgtaggcacaagagcaattctatacttattttatgatattgtcattgatgttcactttgaaaattattttttaaatctaaattttcaaaatattttattagtcttctgttaggtcatatgtggttcttcctaatgcacagatgcaaaccctgaggaacaaatactgttaaagggacttacaggaatcatgtatgcatattgaaattttttccgagtaagaaagtactgaaagagaggggctgggttaatgagaaacataattccattcccaagggagaaccctggctttctgccaaatctctgctttctggcaggaaatgggacccacttcatcaggtcctttgacaagcatttttctctgtgtttgaattttgggacacgtcaatactcggtgaaaaaatagttcttttaaataatcatcacttttgataagaaggatttagaattaaagtagagtttccattgtaagtaaaataagaatcgtcaaatttcaacattgtttggtaagggaacactgttattatcacaaggcgaggaagcttgatttaaatcagagtttgactatccctaaccactgagaagccattccttttattgttgttaatatttaacattgaagtatattttcatgtttttttttgtttgtttgcttttgagatggagtctcgctctgttgcccaggctggagtgcagtggcacaatctccagcccactgcaacctccgcttcctgggttcaagtgattctcctgcctcagcttcctgagtagctgagactacaggcacgcacattacacgtggctgattttgtatttttagtagagatggggttttactatgttggccaggctgttcttgaactcctgacctcaggtgatccaccccccttggcctcccgaagtgctgggattacaggcgtgagccaccgctcccatcctgaagtatattttctaactgctacttttgaatatcatgcaggctgacaattattttggccaggtcttttgaagtgacaaggtacaaaacacaaaacatcctgacatttttgtattaataaagagatcaaaggaatacacatttgaaaataaaaattaacattatattttataatgttttgatttttcttttttaaatgaaaagtggtaaatatgagttaagttttaaatgcattacagtaatttaataagccaaaatttttcaaagtatgtgcattctgaagttctgcaagatgctctcagactaaagagaaatccatctggaaatgctgcataccatacccctctcttggagttgaataacaccgttggcatatgagaaattctgcagtaaagagatatcattgactttgttgaactctatagttcccaaacttgaccataggagttttttttggaactagtgttttacggcacacacttcaagcaacagtgaaccaaataattaataacatgtagaattctaaaccatatatctttttcacttattgtttctgataaagttaattggaacttctggggaacagatgggtactacaaggtttgttctaaaactacatatagagtgataaagaacagctattagaccctgatctgagtcaacagtcttaagaggcctaaagaaatgtttgctattttgcctgaaccagatccctctccctagaaaactttcagaaattaaataaagagataaagccatctaccacataagctggagtcttaattttaattcctgttagcggtttgacatgatgacattaagctattctaacccccttctgaaagcagttgccaccactctggtctttctgaaagcaatccatctgttagtttccttccagtagtttgatttctgacaggccaggtgaaggaaaagcaaacatgctacttagtaagcacaatatcatcattagagatccacttctttcttctttgtgtctcttctttaattttcacatgtgactatttcaatttaggaaatctgacataaaacaattacaattcaacttgcgattcagataaaccgcctggcgattgttcgcatcacttaggattatttttgctttagaaatagacctcctctctttagagcagtttccttagtgcctatgaaggatgagttaaactttcaaaattgcatctctgtataatttgttaggcacagatttactgcagaatgtaaggcacaccaatatttttcttcattttaattctcttcccttatactcaaattttaagctgtgaagattttattaccaatgaatttttatgtattatggtttatatctaccaaggtacaattatatctaccaatattcatttacagtttcattttcatgtgctagctgcttctcgtgagtaaatgtcttcttttagactttgcaagtttccagaaggcagggtcatacacccacccacccttttcatcactccccagagcttaacccagtggtgcttggtacaaccattttctcagtcagctctgttgattgctgatgatattgaatcaaaatgcacattgccgtctgtggactgaagaaagtcagatcatgattccatctccatagatttccacggagaatatactccaaccatggccagtttttcaagctatcaacatgatttcaactggctcacacaaattcttaaaatttaacaatcctctctccaaaaccagtatgactcagctccagcactccaccataggagctgtctttaggaatgagtgtgcaaaaatttttttcccattctctaggttgcctgttcactcatagttcaaccattgtggaagacagtgtggcgattcctcaaggatctagaaccagaaacaccctttgtcccaacaatcccattactgggtatatacccaaaggattataaatcattctactataaagacacatgcacacgtgtgtttattgcagcactgttcacaatagcaaagacttggaaccaacccaaatgcccatcagtgatagactggataaagaaaatgaggcacatatacaccatggaatactgtgcagccataaaaaaggatgagttcatgtcctttggagggacatggatgaagctggaaaccatcattctcagcaaactaacagaagaacagaaaaccaaacaccgcatgttctcactcataagtgggagttgaacaatgaggacatatggacacagagaggggaacgtcacacatgggggcctgtcgggggtggggtgacagactaggggagggatagccttaggagaaatacctaatatagatgatgggttgatgggtgcaacaaaccaccatggcatgtgtatacctatgtaacaaacctgcatatgtatcccagcacttaaagtataatttttaaaaaaaaaaagaataaaaaactccaacaacaacaacaacaaaaaagaatgagtttgtccaggtgcagtggctcacgcctgtaatcacaacacttttggaggctgaggcgggcgtatcacctgaggtcaggagttcaagaccagcctggccaacatggtgaaaacctgtctctcctaaaaatgcaaaaattagtcgggtgtggtgatgggtgcctgtaatcccagctactcgggaggctgaggcaggagaattacttgaccccaggaggtggaggttgcagtgagccaagatcacatcactgcactccagcctgggcgacaaagcgagactccatctcaaaaaaaagaatgagtttgaaaactttccatggaacaaaacaaagggaatgcttgctaaacctgatcctggtatcattaaaaatgcgcttggtaaaattatatcagcaaactagttcttgataggggagtaagtagaagcaaatgtaaccattatgaagtaatacctctacttctagaaaggtaggaaacacgcatacctccaccaccaccaccctaccacactaaactcataggagagagcattgccttatatgacatgtagagaaattaaataagagtgagggtaagctgcatgcagtggctcacacctataatcccagcattttgggaggccaaggcgagagggttgcttgaacccaggagtttgagaccagtctggataacatagcgagacactatctctaccaaaaacaaaaatacaaaaatgagcagagcatggttgcctgagcctgtagtcccagctacttgggaggctgagtcaggaggatcactcgagcccaggagctccaagctgcagtgatctgtgatcacaccactgctctccagcctgggtaacaaaagggataaataaataaataagaatgagaggaaacataacaggctatggccttcaactatttcaatgcttccaattttactttagggagtcatttctccttatggtaattgttaatttattatacaggttgaaggggaccagctgcctccaggacacacagtcagtcaatatgaaacctgtaagatcaggaccataaaagctggcaccttggagaagcttgtggagaacctgctgacagcttttggggacaatgactttacctatatcagcatctttctttcaacgtacagaggctttgcctccactaaagaagtgctggaactactgctggacaggtaagaatgtaaaggagcttttgagttgaaagaaatgtaggctgattatggagtggagcacgaggttctgaatcacctgcacttggtattcggagagagatatgtgaggaaagattaacgggaagggatgacctttggcacaaatgaaaagaagatcattcaggagccacttatggtctgttgctggggaaaaatatctcctaaaagatttataaaagagttgagagtggataccttaaatctagattcagttgctttatggatttactatttgccaccctaaatttctccatatttttataattttatattattcagtaaataatcagttgaccaagaattttactgggatgttgtggggatgaaatgtgctaatatgtgtgaagtgtggagctcattcttagatccacaggaagcagcttaggaatggtggcaatgatgatgcgatgatgatgataactattaacagtcagcatgtattgactgttttaaggatctgcacataaatatccttgatccgtatttttaagctacttattacatagagcagtatacattgatatttacacactgttaaactttagattttcctctttatttctgttttatttagaattaaacttggtcttttagaaaatatcattaaatcaacttgatactgggaggaagaaagctgtcagccaaacaattgttttagaatcaggagaatcctcatctaaatccttatattctggggtttcctgcataaggaaggaaatgagatacggctttctgttgggcttgttgagtattgatgtttgttaactaaatttttttattttgaaagtaatctgtgctcatgctaaaaattcttacactgtggaagaatatgcaaaatattaaagtttgttcatattgctgccttttccccaaataacatttattagatttaaaaatattagtagtaagaagaaaattaaatagaccatcaactaggcaaataacacatattaacattttaaaaatagaggtaatccatgtatatggtgaaaagttccatcagcccagataattataaaaataaaaagtaaaatatttttttctccaagctccaatcccattcctcccaggaaatcactgtgaaccatccttttgtatttttcccacacttttgggtgtatagaaagtatgtatgtatatatacacacatttatgtactgtatgtcatatatatgatatgtttatatatttatcatatgacacatatacttacctatgatacagatagcatcacagtacatagtctgttctgcaattttcatttaaaaaattttttttttctatttttagagataggatcttgtcctgttgtccagactggactggagtgcagtcacacaatcatagctcactgcatcctcaaactccggggctcaagagatcagcctcagcctcctgagttgctaggatgacaggtgcatgccaccacgcctggccagttttcagtttttacttatctgcatatcttggaaattttttactcattaagtgaattagtatatataaaaggcttagaacagtggctggcatattgaaagctcaaaaaatgtaattcttatttcaaaaccagcacgtgtagatgaatctatcataatcttttcaatagctttataatatttattgaatgggttattatatggatagacatttaagttttctccagtttttagtttttttttttttttttttttttgttgagatggcatctcgctctgtctccaggctggagtgcagtggcgtgatctcggctcactgcaacctccgcctcttgggttcaagcaattctcctgcctcagcctcctgggtagctgggattacaggtgcatgccaccacacccagctaatttttgtattttttgtaaagacagggctttaccatgttggccaggatgatctcgatctcttgacctcatgatctgccgcctcagcctcccaaagtgctgggattagacttgagagccgctgcgcccagcaaatttgttttttaaactttgtaaacagtactgcaaggagcatttttgaatatatatcttcggaatagttggttgagaattctataggataatgtcatagaagagtcactaatgggtcaaagtatatcagcatttaaagatttgaaagataactgccagattgcaccagtgacattcctgtccacagaaaacgggaatgcctatttcctcattttccccacactcttgccaactgtggatattttctctctacttttgaaactgtctttgccatgacctgaccactgacaaatgatagcttcttgtttttgaatttgtgcttcttacatttatgagtgaggtttagcatcttttaaaattcttattggctgtttgtgttttcttttctgtgaactgccttttcatatccttttgcctatttttcttttggactcttttcatctaattattgattatctaattataactctgcatattaagggaattagtttgttgcttatcatatgttagaaatattttcctaatttttccattcgttttaaaagttatttattaaaattttttataacgacattaacattttttgtgtagtcatatctattagtcttaagaaatacctttaataatcaagttatattccaatataagtaaggttattgacaatagtgggttttctctcaaagtagtttactcgtaagatgcatatagagtaagattatttggatcaatggttattaatatgttaatcttcaagaatactcacaaaatgtctgttctttgtcatacattgatctggattatgatactttgagctgcagcacagataggaagttctgtagcttttttcatagcagtgcttgacaaaataggcctggaatataaacttggattggtgaggcatttctttatataggcaggatcttatgtaatagatcatacctgtaagtagaaattgaaaaattatatgaattttatctttttggtatttcatgtttataaaaaaatgcagtatgctgttggcaggcagtatgaattgactgttcaaaacgttaaaaaactcctacaagtttactttggaattggtaacctcttctatttatggggtgactattgataataggccacagatatccacagtcaataaaggagtgcacgtaaattccagctgttcatcctaaatagaggacatatacacacaggaactggagtgtttagtctatgactcatgtacatccagattttgatattttttaaatcttttctttgttctattatagaggatagatgtttttgctttttaaaacactaactggatgactgactaacactgaaaatgaatcaaactgcatttaattcaagctgtcatgtacgatataactggagagttaggatttatttttttaccatttggatgggccaaggcttggccttgaatttaatctcataaacagatcctttgcttgcttctgaaatgaatggaattgacaagtactcaatgcctacacaatacccagcttctgcaagacaccatgcagatggaactcaggaatatgagacttgtttcatgccttgagatagtttagaggtagatttactatgaagccactggtacttaacctccaggggcgctcacttggaatgccctctgcataattttatattcatgattttgtattctttttctttgagaggatccctcagattacatatggcttcaaattacatatccataagacctggatccacccctcagtacttaatattttactgcaaaagataacatattaaggcttgcatttctgaaacaagtagataactgcttgagatggtattagatgaagttctaacatgttctgcagatgaaacaggatatagaagttcagaggaataaatatcatttatttagattattctgcagaaattgggatttgttcaaataagtacaaacctcaacatgagtatttcttccttgcttcatttcctactcacacttagatcttgagccaggcttcagtcttgattaaatttaaccaaaatgcacattctgtgaaacagtgggttcttaaattggttgttgagacttttaatgtctataattaagaggaagcaattatgttgtataaacttgcctattctgaagatgagcatttgaaatattattttgtcagtagattgtggtagacttgtttatgggtctctgacataattttaaaaataatttcttttggtttcttaatagtagtttgcttatctgttgtgaaattaacactgagacgctattacagcatgtgctaatcatacaataatcagtcaagaatagattgaagacagatactgcagtatttatttcccaccggagaagcttatttgatgtcaagctttgatttcccttaagacttctaataatgtgggttttctcatatggaactatttgctttctgggatttattttttatcttttgacagttttttattctgctataatatgagccttttgtgattggccaatagacagtggtttgaattcacgtatagctaattccatgtgtttgctttaccccttacttggggtgatcatttcccaaggacccctgtttcctgtgcttctcaacatggctcagagtccacattggcctacttttaacccaagagaaagttcttgaattctgggccagcagtttgtgttggggctttgagattttcttttatctaacttcaaacatacactcactcagttaaaaatctggccaggcgtggtggctcacatctttaatcccagcactttgggaggctgaggcaggtggatcacctgaggtcaggagtttgagaccaacctggccaacatggtgaaaccctgtccctactaaaaatataaaaattagctggtatggtggcaggcgtctgtagtcctagctactcgggaggctgaggcgggagaatcgcttgaacctgggaggcagaagttgcagtgagctgaaattgcaccagcctgggcgacacagtaagacttggtctcaaaaaaaatcatctgttctctccaccataccattttaaacataagggtgttagatactactgaatatgcccaacctcaaatgtagggagaaacctactttaattagtgaccttcagtgagagccatgaaatgttggcacaagtatctagagttttcttcagatagctgtcacaatagctcccttttgggccatttcttgaacattctctctttctgtgttatgcactctaatatcagaattaagcagaatgagctgagtgcagtggctcatgcttgtaatcccagcactttgggaggccgaggtgggcggttcacttgaggccaggagtttgagaccagcctggccaacaaggcaaaaccccatctctactaaaaatacaaaagttagctgggcgtggtggtgcatgcctgtagccctagggagggtgaggcaggaggataacttgagcctgggaagcggaggttgcagtgagctgagattgtgccactgcaatccagcctgggtaacaaagcgagaccctgtctaaaagaaaaaaaaagtaagcagaatgccaacaagaaccagagtaggggttaactaggtctccagaaacctttgccaagctgatggcactcaggtcacactatggaaagcactgagtaatagtctgaattactcccttaatttcaaatgaattctcccagtggaggacattcggggtttttaaaggttggagccatttgtaaacactatgctttaagattatctgacttaaatttgcttgcttatggtgcagagaagagactaattcagtaggtctttgaacttatttcttcttcccatgtttgcttgccatgtgttttcacaggcttcatctcatttagttcacttatttttacccctatgtttacagattagaaaattgtggctcagaaacattcaatcagtaagtagcagagctagaattaaaacctactcctttctgacttggaagctctttccaagtgtacaatatcaccttccttgatttgttaatatcacctttaaaggaacccttttttgggaatcctttttagccatccttttcactactacctcaagtgattttccctggaaactgtatttcccaagggctcctcccttcacacagttgtgagcagttcacttgagcatcagtgctgttatttgtctactcaagcaatatttatcagctctttaatgtgtactatgtactgtacaagatgctgtgtgtataatggtggacaaacctgccttcttcatgctgaatgtctagtgggaaagagtaacattaaacaaatcagtgtgcaaatacatttatataattaaaattgatagaccactgggagataaaaggttctataacacagagttataaaggatattttggagagctgtacccaaataaaactgaatgttggccaggatcttaggtgatcacttagatcatggcccataaaggtaattgctttgtctgtgtgtttggagtgtttctgtgtactgaatgggcctggccaaatccctgacctcgatcagcttttcctgaagggtcagggatagcaaatgagagagcacgggtggatttaagtaagtatagtaccaccgtgggaacagaaaccttaaatccattctttatgtcgcctggagtaacattttcatatgcaaaacctgacataccaataaccagcaaaacggagctgcctttgttagtgcaaccagttcctccacagtgtagagaggagttgatcagatataaagcttgaaaattttcatttatttccaaggattttgtcatagatgtcaaacagacttttcagaattttaggatacattatgggaaaagcaatttttcctgtctttttttttacccatgagattcagatttaaggcatatagtataatggttaagaacatgggcttaggagtcagaaatttgaattttattccagttttgcactccttacttgctctgcagtattgggcagtgaatttatcttactagcttcagttttcctcatctataaaataacaaaaatagcacctaatttatagagttattataaagtttgaacatgataatataggtaaaatttgtagtatagtggctgaaaaatattaagtgcttaagagattactattaccttgttttctttcttcaaggcatttattattatttgaaattaccttatttatcttgcttatttcatgactgtctttcccactcagagaccatgttagtcttgttcattgctctaccctcaaaatggtgcctgcagtaggtgcttaggaactatttgtctaacaaataaataatggttatcattattcatgccttttccaagcaggtgttttggaaggtccagcagtgaacattgcccagcctctgcccatgtttagtgggagagacaaataagtctatagactcgtgtcatcactgtcaaggccatgaggctgaatgtgcgtttttaatgaaaaccttttccccccgggagctggtagttgtaaaccttctataaaaagcccattgcacacatccattcagttctcaaatgctttcgttgcatgagaagctggtaagtgtttttgagatgcgtacaatatgttccaatttgctttttgttaaacctcacttaaaaataattgaattttttatttagtgctggaattacactaggcacttgccaaatattcctagattcatgctggcatgcagtgttcatgttcctgtacttccttttctttcagtaagaggcaaggtttctaatatctttcctctcctcttccaggtccaaggaaaggaagttgtcaacagagagagcactgggaaacatactggaaactgaacccgcacgacgggtctcagagcatcttcatgtgacttatggtcccagtgtcgcctctagggtcaccagcatctagaggtgacactgagaccataactcacctgtaggtgctggtctcttatagcattaacactcacattaaatcttgttactatgaaactcataatttgatttttttctaaactttttgttctgagttatttattaatgtttaacttccatcacttacataggaaatttttcaaaataattccataccattctcttcattaattttagtaacctcctacagggccaaatcgaaattagcagagagggtcactcattaagtcttttgtgcctcccccaacccacccatgcatgaaacagttgagatttagtggttggtggctccaggatgcacatcccatttatttagtagaaaaactttcaggaaatcttaacattgctttgcttcctttctagcttaacatacaatcatattgaatatcctgactagggtgagaatttcttagtaaatgaaggctgctatttaagatttttgttagaacagatgagtttaaatagattttctctaggtctgggtgttgatgacttcctaggcaaaaaaacccaaaaaaacttggatgggttacacacacatacacatacacacacatatatataacagaacatatatatatatgttctgttatgtatatgaccctctctactagtttccatttggctctgtggggggttactaaaattaatgaagagaatatggaattattttgaaaaatttcctatataagtgatagaagttaaacattaataaataactcttagaacaaacaaaaagtttagaaaaatgtcaaattatgagtttatgttctattcaggacatcatgccctgttcagttttggtccacacactcagctccaggaagcatggctggagccagaatgtgaccagaattgttattattttctccctgtaaatatatatatatttttatatatatatatatgttaaggtgttttttaaaaaaaggtagattgctgaaagataaattggacttagatcttatttcctgcaactatgagaaacatgacactattggttggtagaagagaaaagaggattgtaagaagggtgtgaaaatctttgggtatgaaaatggttataatatagaaaagagcattaaaaactttgataggggatgcctttcataaaaggtctcaggctcttgctggctcacactttatcaggtggagagaaacagtttagctcagaaaacaatagaaggtataacatttataataatttacatatccaaagatgtccacatcctcatccctgaaacctgggaatatgttaggttatatgcaaaggggaattgaggttgcagatggaattaaggttactaatcagctgactataaaataaggagattatcttggattatctgagtgagcccagagtaatcacaagggtccttaaaaatgtaaaagatggaggcagaagacagagaaagagatacaaggatggaaatgggatcagatagatgctatgttgctggctttgaagatggaggaagggggccttgagccaaagaatgcaggcagcctcttgaagctagaaaaggggattgaacagattctcttctagaacctctagaaaggaacatagccctgacaacaccttgattttaacccattgagacccttgttggacttctgacttacagaactataaaatagtaaatttgtattgttataagccactaagtttgtaataatttattccagcaacacagataagaaacaaggaattcttgtcagggagattgactctgaaaaatctagtggccataggctcaaggatgttgaaggtcggtgtccaccctcacctttgttctgttcaggacatcatgccctgttcagtttcggtccacacactcagctccaggaagcatggccggagccagaatgtgatgggcattgttattattttctccctgtaactatgccagttactttggattaaccagaaaaatttaatctggtgctgtttgagaattatatccaaccataattacctgagggaaaatggaaataagttctcttccctgctgggttggtggcctttggtaaatatttacttttgccaagtggacccaactgtcacctgccaacactatgggaattctggataggaacatgtggcgactgtagagccttagcttgtgggacgacagtgatggttttgttaaagtagacactgaggggatgctgtcaaagactttgcctcagatcatagccaggctagctttcttttcttgaaatgggatttataagacctaagagataaaaatgtttccatgaagtagcttgttttttttatttcacttggcaaagggaggcaaggacatgcaattatcctttttttgaaaagaatataaaattgcccagcaggttttttttttaaagtgtgcttaacatttgtaaactacaaaacaaaactgacaagaaactgaaatgtaatgggtggtaactgagttagtaactggacagtcagacattcagctttgatcatttaaagcagtggttttgaccatttttcagcagttggtgggagtgattgatcacaaacccctgtaagaatgtactaaaaactatggaccttctctttagaaaaaagagaatgtcacaatttttttcataaaatttagggacttcccagacttctgtaaattcatctagagaccctgggttatgatcccctaggcaaagtgtccctagcgtggtaacaggggatatgtaggcagccattatgaatgagaggtgggcactgatcctagctttattataactggaacacagaccttaagtgtggctctgaaaagtaaaccaatcaaattaactaaaattacgcttcatggttcattcaggtaaatttaatggttttagaaagtatcttgggacatctaaaaggggaagatactggtggttttgagttaattttgtttttcatatcgctattctcttatctgaaaattttttttacatttattttttgtgaacttagcccttgataatgctgtcaggcccctagtcctgggaacacaattcttttgcctttggcctctactaaagctaacagtaagcacccatttagataaattgatattccgttgagtttttgtaagctataggcgaaaaagaaaagtattcttgaaaatgaaaggatgccatgatactaaactcatattcattgtatttgatgttacaaagcatgtttcataagattttgaagagctctgcaatagcagctttttgtggttggggaaaactgagccacaggcttgtactgatttgttaataatgtattaattcatcttaaacctgagaaaaatctagactcatgaacagagtctgagtgctgcctccttcctacccccatctaccagtttcttctgttgtccgtcattgtagcctcatccattgcagtgtactaacaagatgtgtttgcagttggtggtttagcattgttatgaactagaagtggaaggagtagctacggatgggccaccaagctctgagtgcaggaaacaggccagagaaaagaaacggatgacagaggcttggaatggaaaatagaagaaaccttatagcaggagtgtgagagccaacatacttaaataattttaaatctgcgtgagatataagttgtggcaggagagaactttttttctttcccttggatgaatagtgtccttttcttgaactcctctttagacagttgtgggttaagggctggaaagaaaggttattctccaggaaaatgttatagcattttgtaactgtcaagtggggcagaaatatcaggtactcttttgctgttaatgttgccttaagtgtcagggacttagtatggagatatgtggacaatgaaagaacaaggaaggtgcagtgtccttcacagcaaaggcctagaggtgaggagggcagcttttgttgggtcttctagctttttctagtcagggaaaaatggcctagagaactaaccctcataaatggaaagcacagtatagggttctcggctcaatcttcttggccccttcctttcctgcaagagaacaaggagtttttgccttgttgtttttgacctttgtctttccccttgaataagtaacttcacagtggtaacaagacctttccaaggtaggcttggtggctgtgacccagttctcaggtcagacttggcggagaggtgcctgccatggaggatattattcagagtaattaaaaccacacttcttgctgatctgtggaaacagtccaaagtcttcactaaggttttcaccagacatctgcaggctatttcacccatgtcgttctcctgagtcaaggtcagcttctgaacatttttttcatacctgacctgtgttcttttgggtcagttacagaaaaatgcctaagatgttctgaggccagcatttattagaaaagattcccaggagtccttgagtcagcagcttcatgtgaggtctctctttcctttacttcttcctttccgttctttcactatccccaataaagtacctccttcccaactcttcccgccccagcctttcttttattcttggtagaagagggtgtgtattaattcattgagcaaatatttattgtctactttgtgcaggctctattccaggctcagtagaagtagcagtaagcaaaatagaagagtaaaaccagagtccttgccacagcctacctaccaggccctcagcatctgtccttgtcatctccatgcctccttttctattcacgctcactcagctctgcccctcattggcctcttaatgtttcttagaaacatccttctgctactcttccaaggcctttgcattggctctttggactgcttagaggctctttccctggagatctgcagggcccacttcctcactttctggagagtttacttagttttcacattcacattgggccttccccaaatacccaacctctggccctccattataccaggtcaccctgacctgctttatttctctccattgcacttttcactctctgacttagtatatattaactaattattgttgtctgtctcctccgcactaccatgtatacttcatgaaaacagagactttggtttgtttgctgctgtatcctcaatgtctagaatagtacctgtacgtagtccttagtaaataatcctcattgaatgaggactaaatgagtgaaagaatgaatgatggaataaatgaatgaaaggctcaccatagcttgtatggtagggagtgattcagaggctggttgctgaacgctgactgtcatggctgaaatccctgctgcacgtattagttgtatctttgagggcatgttacttaatttaagccttctgggcctcatttttctcatctgtagaataggaataaaaataacttcactctatagaattataggagaactaaaccaagccagcatgtaaagcccttagcacagtacctggcatatagtaagttctcaataattattaactgctgttattattggatcatttgccagaatcaagcagagcctgagagattcttcaggatcacccgcctcctgatctggtgttactgagactttcctgttggggagcaaaggttagcaagggcccccactagagagaccgtccctgggtacaactttatctaagggtttctttgaaccacagatacacctggtcttccccttcaaacacatataaaacacttcaccttaccagataggctacaaagaatacagacatcctctctggaaataactgtttctgtttaaatatttagcaaccagttaaacattgtactggttttttctttcccttttctattactttttaggctgcagtaaataattgcttaaggctgcactttaggagacatttgtaaatttttcttttgccttgtgataacagagaaaaccatgtcaaaagtcattctgacaatttttattttaagttttatgagttaccatttaaagaagagcagttggtcattggtaagccttcttaagaggttggagctttgatcttaaatcctagggaggctttgcagaaattggacacgacatcgttgacaggtttgttggtagctattctatggccattaattaaacatacacactcatacacacactttatttactaccctggaataagtgaattgaacttgactttgagttttgatgggaagctatgagagggtccaggaaaacatcaaaggaaccttcttaatctagtagtactgactgtcaaaggacctagcctgaacatttaaagagttctggattccaacactagtctagtttcttttctgtaaagcagtaattctccttaatgataagaaaggtgcagggatggcctggcatgttggcttatgcctgtaatcccagcactttgaggggctaagacgggaggatcacttgagcccagaagttcgagaccggcctgggcaacagagtgagatctcgtctctacaaaaaataaaaaaaattagccaggcatggtggcatgcatctgtggtcccagctagtgcctgtggtcccagcctctcaggaggctgaggtgggaggcttgctcaaacctagaaggacaaggctacagtgagccatgactgtgccactgcattccagtctgggcaagagagtgagaccctgtttcaatgggaaaagaaaaaaaattaagaaaggtgcaggggcaaataatcatctccatcccagtccattaagttccacaaggttacaggctctttccttttatctcacttctaaaagacttctttggaatagcgtgtatacttttgttttgcattttaatagtttttacctttaagatctcaactttaacatcttaaaactttttttctttttaattgtagatttttggaataatcacagctatcttaaaacttttatgctcctaagcccttagaagtgagggcttgatacttgtagaagcataaataaggccagatgatgcctttgcagaggcaaatctgaacctagtagttgggaggtccattactgcgtctgcttctgaaaccccaatagagcactagcaacaggtagctattgcatgcctgttgggtgccaggcactaaagagttgggtgccagctctaaagagtagtgagcaaaaagaaaacatcctggtatgctggagtttattttctaatggacaattaacacaacaacaaaatgaactacacagtatatcagaaggtattaaaagccatagagaaaaataaaggagggaaggggctgatgttacagttggtttgtattttaaatagggcagtctgggaaggcctcactgataaagtgatacctgagcaaagacctgaggagctgagagagtgagcccttggcacaggtgtgggaggaggcagcagcaggcacagattcagaggcaggaggatgcccagtgtgtgggtggagcagggaggaggctggtgaggctggaaagggagtaagggctgaggaattgtaggaggcgtgggaggaggtctctgcagatcattcagggccttgtgagacacgtaagactttcgccttttctcagagtgagatgggagtcatgggagggtttctccctttttcttttttcttcttcttcttcttcctttttttgttttttgttttttgtttttgagagacagcgtcttgctatgtgttgcccaggctaggcttgaactcctgggctcaggagatcctcttgctgcagcctcttgagtagctgggattgcagacatgtgccaccatgcttggctttttatgggagggttttgagtggagcagtgacatgatctgatctacctaaagcagaattgctctggctactgggcagaagctggggaccatttaggtggctgttgtattgatttaggttacacttgatttacactatccaagatagtgtagttggagccagggtggaagcaatggaagtgatgagaagtgtttggattcaggatatattagaagggcagagcaaaaaggatttcctgatgggttgggtggagaagagttagtatgtctgcaagatttgagcctcagcaactggatcgtgtgctctgccacacactcctttttatccatggcccttattggtgtccaagttattatcaagcagtcactctgatcccaattgagaaactgtagacactctggtagccaggagaaatacttctgtggtcttctgagccattgctcagaagatgctaccaggttagttaatgagagagaacttggctcaccagtataagttacttagtctttcttgacaccttctcattacacatttggcatcacattctggggaggaactgtgatagatgttggtgccatccaaacctgcacctcagctctgagtctgaagaatgcaggaaaagagcagaagagtaggaggagctaaagcaaagataaagaatagagagatctggaaacttgtagtacaaaccactttgaaaaaaagactatcaggagcagtaaaatgtgtatctttccctggtgttttccctttttatatctacctttcatagcttccagttgaaagataaaaagatgtgatatttccacaataactggagtgggaattaatggactaacatggaatgtaacaaaaacaaagattaagtcccacatttagtaattgagagatggcaagagaagagtttatggatccttctagtcagatacatagaagatacactggctttccaagatcccactcttgcttgcacccaccgtaatctctcctacttaaataaaccaccaagcctgctgtgagagagtacgaggacatagtttgctacgatgttggccaagtatagagctgaaaaatctcaccctgtttatttattaggaatcttgttttccatccttgccttgctcatgtggggctgagtaaatcttaatctgagttcttatctcaggaagagcaaagggtagccctggaagccttctaaatagcaggtgcaggacagaatgaagaggaaaagagagggtggagaccagtggaaaatatctttgagaggccaagaaatccataaggctgatgagctagagaaaggagcaggtggatgggtgagctggtgcctaagggcgcaaactggaacctaccgggatgggatgatagggacaccagatggactggcgttgggtcaaaccagatggtgggcttttatttttaaaaggatttgtaagtcctaggaacaaggaaccataagggtactgggcctttaatcccattagtagaaaacaaaagtgtgctctttaaaaatgtaaactcatcaattatagaatttatcaaaactttgggacagactactcacttgtgaaaccccaaggaatctctggattctgtattgatggaaggagaaactgaagaaatagtctaggcattataagttaattaaagactcctccttaataatttaaagtgcgtttactaagtttacattccaaaccaaacaaaatatgatatatttgtatgaaataggctggctcacatgtggagttgggagaacagctagcagtgtaagtagggactgatgaattattgagtaaattttgagttggtaatgagaaaatttttaaaatttaagcatctattgctttcccaaaaatcagacccctgcaccccacctccccagttgctgtgtctagcgcaacctggcctcagtatagctacagctgctctcatggttgctaagacatgagagcttctactgtagtccttgtctctatcccagccttaattttagggtccagagctatttccataatccctctacaacggacttattttcaaggagaccagactcttaagtgtagcctggagccatcagtttgtgctcccatgtggcatgagtgtggatgctgtgcctgcagagccatgtgtcccttgcatagacatgcagaggggttggacgggagggtttggtgtgctacagagttcatgaggaatctgccttcttcgtattatgtaatagccgattctcctgctgataggaacactctaatctaaaaaagtcaataaatgttaagtgttaatattaagagaaagttttaagtagtgtgattagttgttaaatgacttttctgtttagaatatgcagatatatccattaagtaactatcaataatactgcatcattttcaatgctatttcatagatatatctttccttaattacttctgaaaagtataactgtcactttgtagttgaagttgaatagagttgctttccaacaccactgactgtttttgcttgcttgttcattattatctctacaggtatggaaacctgacaagcccaaactgtgaagaagatggaagccaaagttcatcagagtccaaaatggtgatcaggaagtgagtctcccttttctttgcattctaagctctcagtcaagacaatatcttaaagtagtttagtagagtattttattcctttgaatgttgccatgatttttttttccatagtgcatacagaggcttattttttgattacctaacaatattcatttatgtatccagtgaaagtatcttaagtaaccactgtctgccaggcattgtgctaaggtatacaaaacaaacaagtgaagaaaacaaacgaacaaaataaacagtcccagctcataaaaagtgtgtattttaccagaaagagacaaagaatacacacaaaaaagtgaagaagaatgaagcagggtctgagggctggagcgtttggctatgtgtagggtgcccggattgggctgtctggtctgttggcattggagcacgccgaaatgaggtgtgccctgagccttgcaaatagccaggccgacagaccacgggaaagcctctgaggcaggagcggtgtttgagaatcagcagggaattgcatgtggccggagcgcgtgctaggggatgagcactgtgaggtgagcaggaaggtggccactcacaaggggactcatagcaacttggggaaagatgttgaatttgattctgaggaagataagaagcgcttagaaggttttgagaagagtgctgtggcctgacacatcttaaaagacccgctctggctctgtgtccggaaagtagcctgtggcagtgtggctggggacaagggtgggagcagggagcctggtcaggaccctcccaagagtccagatgagggctgcttgtggtgcgggctgaagcaatagcagtgaaggtgaccagcctttgcagagatcttccaggtgttggtggcaggacaagctggagtgcatgggctgtgtgagagaacaagaggaggccagatgcttcccagggttgcggtttgagcagcggagagacagaaccttggctttataaaataaggaagatcgagggagcaggtttaatggggagtgtgtatcagaaattcagtcacagacataattagctcagtctagatttcagggagaggcatggaatggaggtataaatttggatgtctttagtttatacatggtatttaaagctatgagactgaatgtggcttcctgggaactaagggcagatagaggagagaagatccagagactgagcctggttccttgggtgtttagagttagggaagtagagcgtctggcagaggagactggaacagagcagctttggggaaggatgggggaggagaaaaaagaagttgttgtgtccccagaagacaagcaaagaaaggatttcagggagggagtgaccaactccctccagtgctgccctagatcgagtgtgagggtctgaaaagtgactcctcctttgcagtgctgcggtctttggtgacttgacaagtgcagtttggtggatggaaaggtgggcaagagagaatgaaggggatgaagtggggacagtgagtcttgttagaggaggagctttgctgcaaaggggaatagagaaatggatggaagatgggttttttttttggttgtatatgtgttttttaaaagatggaagatattttatgctgatgagaatgtcctatgagaaaacatccatgatgcgggggtgggggccattgtaggggtgatgttcctgagtagatggaatgtgcacctgggtgcctgaaaccactagtgttaaatattcattttggggccaaaagtctggggggaatcctgtggaatttttaactcctcagaagagttactgatagactcctttcttcaggagctagggatgtgaaagtagaaagctgagtatcttttttaactcctgagttaggttccatgtagttttacagttttgttcagtggatcataactttccagaaaaccagacataccagtgtaggtatttgaatgtcaagcacaaggtacagtgggaggaacaattcttttgtttttagaagggcttggggaaggcctcttggaggaggttacctttgatctgggccctgaagcatggtgaagattttgttggtagagccgtctgggtataggaaacagtgggaccaaattgggcaaatgcaattttcatggaattttggggaacaacacagaattggtgtggctgcttcatagagtacatgttaggtgagaggggagtcagtggagctgaagctagattggacttacttcatgaagggcattaatttcttgcaggagagtttggactttccctggtaagcagtgggcagtcagcagtaatgaatttttataggagggaaacaatataatctaaaaggtgatttttcagaatgggttagacatagagccttctcgctcaaagtgtgaccgtggacctatagcatcagcatctcctgggtgggagcttgtgagaaatgcagactctcaggccccactcagacctaatggattagaatctgcattttaacaagattctcaagtgattcctaagcactttagagttttgagaatcataggagtctatgaaaactcactaagataatgatttttttagaagaacctttttataatggacattttggagcatatacaaaaggagagatactgtaagaattgagtgtaatctagacttgtgagcagattcagaaatagacatgttattatacacatattttggaactcagtccaatctagagctgccattcaattagccacctgaacactctgaggagagtcacaatcaaaaatatccagagctggccgggcgtggtggctcatgcctgtaatcccaacactttgggaagcccaggagggaagatcacttaaggcaggagctcaaaaccagcctgggcaacgtagtgggactctgtctctacaaaaatttttttaaaaaattgctggatgtggtggcacatgcctgtagtcccagttacttgggaggctgaggcaggaggattgcttgagcctgggaggttgaggctgctgtgagccatgatcgtgccactgcactccagcctgggcaacagagtgagtgagaccttgtcttaaaagtaaataataataataaaaaaatccagagcttctctgtcccatgaggtgttttgagataaaatagattttttgggaagtagcagttaagaaaattgcaccctgggtatgaagagtcatgttcattcttttaaagtctcattcgaattcgttgtatactaggaacactaatgtgaatgaaactccaagctaagctgttttaaagagttttagagttttaagcatatgagggcttaacaaagagcttcacacagaactcccctgaggggtccatcctctggggacaatggtcctttcctaaagtctcacaataacttggtggaaagttcttgacccttttgctcagactgagttgccttttaaaaaattatgcctgatgaaaatatgccactttatcttataatgggtcgctctgtcctacagattctggaatgttaaaatcccttcttactggtgacctctttcttccttccatttccctttcttctgtctttctcactgttttttccccacatcttttattgtttttcatctcacttcactattattttttggctctctttttctgaaactatgcttctcctgatcatttctgtgcctagatagggtcactgctttgtctttgtctttgtgagaggaaatcagggaagcatcttctcccatctgtatgtaatgtattgcaaatttcctggtcatcccagacctctggcatctgacttgcagcaatgattgagggcttcctgatgatcaatagatgtgtaggaggtatggcagtggttctcaacagggcgattgttatcctccagaggacatttgccaatgccctacagacattttggttgtctcaacttggtggggggaggctattggcaactcatgggtagaggccagggatgctgctaaacgtcctagcatgtgaaagtttcttgtattggttcgaaccctaaaagcatgccaacagacaacacaaagcggtgtggagcaacacactgttttaatgagtgcctgggtgcaggcgggctgagacctaaaatgacatcagccccaagtgaggacgggacaggggctttgtagtcctctgtaaacaggaagtgtcccagtctgacgtgactgctacgtagtacctggacggcctctttctcggtcttcaggggtatgtgtcttccggccagggtaggtgtcttccggccagggtagttgtcttccggccagggtaggtgtcttccggccagggtagttgtcttccggccagggtaggtgtcttccggccagggtagttgtcttccggccagggtaggtgtcttccggccagggtagttgtcttccggccagggtaggtgtcttccggccagggtaggtgtcttccggccagggtaggtgtcttctggcccgctgtcttcctgcttctgctatcttgctgacgcgtgctgctggcgcaagtggccttgagctttgggactgggcctgagaagggaggagttactcatcccttcaagctttcgggcccgggggagaatctttcagcatgcacaaagtaactctcctctaccccaacaaggaatgatctgaccttaaatgtcaatagtgcctaagaagccctgctatgtagtattgaggctctagttctcaagtgaaactgtctttatgaatacctaacatacataaaaataggagcaggcctatttggaaatttctctatttgtgtctctttttataagtagctgaatcaaatgtggaagtgattcagaggcagccacatggagagggaaaggccctggtgaaggagcctggagaactcggatcctgctccttctctatcactctgtcacttaccagtcatctgaccttggcttagtcccttcacctccctttgtttcagtttcttcacctgaaaaatgagtgcttggagtaaatgctcgctgaggtccttttaagttcagtgatgtctaagataaaatttatttagctttttctttctctcaaaaaatgaataacagaaacagagatatggtccacacagcatagtggacttttgagagtacggtaccttcgaccacttttctctgttggaaagtgtgttaccagttttgaagagacaggaagaaacacatacacaagctttgtttgttattagtcatgacatcacagctgctcactggggtcatgaataaagagctgagctaaagcattgtcttgtgggagtaaggcaaggagtggcaaaatgcccattgttttcttttgctatgaatctgttctcttgtgatttcaggtggaaaaccgacagcaggaatccaatgacattcaggaagtaaacatcctgtttagggcagttgccttcagttttgcagacctgggtggaggaggggatggggacagggactcactattggatttaaccatgaacagaaaaatgcccaaatattgtttgttttcccgttttagctgtaaagcaaagagcaacccttacattttatacaggctcccaagtaccaagtaaaatctttcctgtatttccaaatatggatttaaacctttcagagggtaaaagaactttaaagaaggaaaatgtggaaatacagatgaagcattcaagatgaaaaattggtttctgatgtcttggaccacaaccgactagtgttcttcatgcatttaaaaaagtatcagattgtgcagggactcccacatgcggagtacttgtaattccagtccagagttcaggctttgcacaatgtcaggaccctctaaagttatctggctaagacaagaatgtgttcagttgcaaaggattcaacttccaaggcttctggatgttggaatctttgcctcacggtgatttctgatggtagggctagactgattatataaggtgtgccacatttatttctaggattcctaaattggccactatttatcaattaggaaactcactttctatgacagaagaaaacatttctgcctatattcattctacccgtgcccttttcctgctgacatttttacacgataaaatgctatctttttaaataataaaatctgaaccagatggaaaaagtgaattgtctctagggcagatttattatagtcattgaattcagaaatgaagagaatgtaaagaagggatattaaccatatagagcttttacaacacgaatcttcattctctgaattttatatgagatggccatatctccctctctctatatataactttatttaaagagatttaaaactcctcaagaaatgatgctttatttctttcctttaatgactattataaggttgaaattgtttctgttttcttttctttaattgaatctcatcagtttccttctggagtgccaagttttgttttctcaaactctctaccatagtactacttcaaattgttgaaatcgttctgctttcatttccacatattcagaagatacgtatattgttcttgtaatcttttcccagaagttgtaaacagtgacaccagatttcagtcactggtaaaggatcatgtaaatagtagtaatccaagacatcggatacactttaaagagaaaggaaaggagttaaaggaagttggctgtgttacattactgcctcagaaacttcacagtggaaagttaaaaaatcttcccagagagtttgcaatcaatattcattcctgcaaattcagatgccctaagaaggcaattgaaattaattggagtgattataacaaaaatggggaaaaggaggaggggtgaagaacagcaaaaacaagatttaaaactccaatttagaagaattaaaagttataatgtgaaaggaattttttttaaagtgaaacaaaagaaatgaagaagtgatatgccatatcgaagagtctggtattgtctttaaaatatccctacaggacaaagaagaataaaaaccatagttttacaagtcattagcattctaagtcaagtctgcattttagggacatgggtagaaagccctgagcagaaactgatgttctaatagttgaggaagaataaaacaacattgataatcaatggctcaaaaagaagacagatcaatcatacgagtatctcctagggttttctacattaaagaatgtctcttttagaaaggaaaacagacatcacaattagactgtattgtttgattccctgcacagcattgtaaacaaagaaaatgatgacactgcccttgccaccaccattggctacaatttgtggtatgcttacaaggcattctgctaagtactttatatttgtgtcttcttcaaccatcacaaatatgctgagatattgtcctcactttataggatataaagtgaagcttcagagaagttatgtgttttgactaagatcaggcaggtggttaagtgacaggtctgatatttgaactcccgtccaactgactccaagacctgggtgggaagcccaggcatgccatttatagaagagcattgggatctcggatactcaagatttttctccgcatttgcctatatcaccataataagactgcggaagtacatgaagaactagattacaatatcattgttgtgactaatgttttagattgttattattctgagatcttttgtcattatttccattgctctatgctgttttgcctggctgttgctttattattgaatgaacaccctgagcaaggttcgcacacagctgttagaaatgtggaagctagacctttttcctggggaaggagatgggttgaagaatgtgaggaaacaagaccaaattaggcccatcaaaggagaacctgcttcctgttccttgtgcctcgtagcatctgtcactaccaacggaaactcagttctagtggtgaaaactatagaaggccttagccatttttttcaatagagttctatttataacatgaaaactcccttcttggactgtggggaatgagttattgaggtccttgaaagataattttggtgactggcgatgtccttttctaataatagctagaatttattgactacttagtaggaatggtccctgtgttaagtactgtacatacttgttaaatcctcataatgattatgttttattattcttattttacagaggaggaacctggggcgtaggttaaggaacatgtccaaggctacacagtgaataaatgaaagagctgggatttaaccgaggccttaacctctgtgctgcatgacctttactatttttcctctgataaaaatgaaaatatttctcttaagtacttagcttgggaatgaaagacaggtgtgtaaataaccttgactttgggtaattggcttcaggcttatccatcctactccgggccctctcccactcacatttactgtctttctgtatgtcttcctttcataatctttttcttcctccttcttgccgtggaggtttttttttttctcttctctcccttccccatagtccctgcgttgcccttgccttcttagtgcttaaatctgactctggctttgttggcattatttccctggtcttttctcaatctctctttcacgtctcctcctagtatttgaatccctgtttaccaacagcactgaaatgtgacaatgtaaagtgtaaaaaagcaacgcaggacaaccttgacaagtccagataataatattttcatcctttccaggaaaaaaacaaagaggaaagctttgtatctttctttgttccttctcatcaggaaaatcatctagctggaggtctcagaggcagcttctatctggcaaccttccctgaaacagagcaaaactgttctatgattaggagaacaaggtggagggtccggcccagagtcagggtcaaggttgacttaggcttcagttcttgaaggacaaagtgtattagatcctgccctcagagcttggcagaagttacttcattgcttgaaaggcccaccgtctgcgtaaatcttcttaccttttcattatctgcagcgaagacaagatccagttctcagagaatgtattaaaatagaaaaacattttgctgcttttgaaaaatggttccatgtcttattttctgctgatgattaagtacaaaaaattattatttcaaatagattgctggggagagaaaagaactctagatggatagtgttattctttttgtcacggtaatcctatttcttggctcagaagttacacatcatgggagaggtgacttcatacctgaaaaaatttgtattaaacatttgaccaattatagagtattttactgcctatggaatgttaatatgatttaatacgtttacctaaaatctgcattcattaaaaagtctgtgatttgcgcataatcgctgcctaaatgcttgcctcagccctctctgcattgcgtgcctgaagatcgtggggtggctagaagttctgaaccattttcttttatctctcagccaaggtgcatctgtctaatgtcttctaagcaggtgttattaggtgtgatttctggttggctgagaaatcaatgagtggccagctgcggtggctcatgcctgtaatcctagcactttgggaggccaaggcaggtggatcacctgaggtcaggagtttgaaaccagcctggccaacatggtgaaacctggtctctactaaaaagaaaaaaaaaattagccaggcatggtggcacgtgcctgtaatcccagctactcgggaggctgaggcaggagaatcgcttgaacctgggaggcgaagattgcagtgagccgagattgcgccactgcactccagcctgggcgacagctctgtctcaaaaaaaaaaaaaaaaaaaaatcaatgagtatagcagatttcatcatgctcctttcccccaactctttatattttttagtttaacagatctttaagtcctctacaagtgtttagctctttcaccgcagaacctctgcctcattgctgccccagaatcctcatcccactgactcctaaccctcaagatctcagctttcacatcatttcctcagggagatcctccctaaagccttgaccaggtcagctccctctgaagttcagtgcttccctgggaccctggacttcctgtattgtgatgctcatcgcataaattgtttttgtgactctgggaaataaagggcactcaacaaatattagtttaattggtgaatgaatttcttagaagcaaaagtcctagaagctgctttagtatgtttcaaacagtgacatctgagcatgtcttccttcccctatagacgattgcagtcggttggaaaagaatcacacactacaaagttttgtatgttgccaagaatgcctgaggtagaaaactcaattttggttgtctcctctgctatcagttttgggcccctggccttggccacctacccggcatacttgcccttaggaccgaggagttttgttctgtgagccaccaaagattactttggaaaaggaagtcacatactggcttttctccagactgaatttaggttatgtcacaattgtaatcatccagtttggcttcaggaattacttctgcctttacaagttattcaagaatcatctcttgcagttaatactacagtttgatgtctttgatttgtcctagagaggatacctcaaggtatatgtatgtgggcacatatgtgtgtgtgtgtcttgtgtgtgtgttcacagcagccatcttcttccagcaggcctgaagtcacacatgtcatagcatggcttgtattctgtgtcattcttcctgtgagaggtggcagattctttgagtcaattcctgtgagtgctgatggattttcgctgagccattttaccttttcaatcccttccttctatgacttctggcaagtagttgtaagactgttgataattatgtttctctccaggtatctcaaaatgtccttattgacattatatcatttgaaatcacaactgatcagtgtcaggtagatgaagaaggtgttattatatctcttccccagagaggggggtcagtggagttaactgacctatccaggcttccttagttccccggtgggacagccaggatgaaagatagagttttctttctccaggtctccaagcgtcctgtcttggtctgtgtacagaaccaagtggcttctgtagtctaacagacataccagacctgtaaatttgtgacttcaaaccagaatttcccttcagctgtaagattctttacatccccccactctgttctggttaatatataagttagatcttaggactggagccaggctgggtaagaccgaaaagccattggccagtaatcctgtttttcttttcatcattattttgcgatgttgctttcttttttgaaatcttaaaagtttcgcatttgtatctgcttctaaatctatcaagaacggaaagtttcttcccaggactggcacacacaaagctactgtgagccttgggcatgtgtccaggcctttccagaaagcttccctgcctggtgtgctgagaaacgctctgccgatgaggagggcagggctctgcctcgtgttctattgtgctgtttgtgtatgtctttccctttctctgtttcttcgtcctcctcccccttcattcctcttttgtgtgaaaatgcttttttctggctgattgagtatctgagtttgtggtgaactttcaaagccttcttaggctaagctacaggaaggtcactgtcacaaagagtaaaaaaatgtatagatcgccagagttcattaaaaacatcagattgaggaacacaaaatgtccacctaagggcaagtctaatgtggacgaaggctcctctttagaactctcctagttcttctgaggctgcagctctccatagaggtaagtgctgtgtgcccatcagaaatacccacacgagcatgcagagatggaggcaaggatgcacatattttgtagttgtgacaacctgaaaataacttaaatacctgccttccagtagaagaatacttaattatggtgtgtccacatcatgagaaacaataagatagatctagaggtaatgatgaagtatctgtaatatactgctcagtaaaaaagcccatgttgattttctttctatctatctatctatctatctatctatctatctatctatctatctgtctatctttttttttggagatagggtctcgctctgttacccaggctggagtgcagtggtgtgatcacagctcactgcagcctctatctcttgggtacaatcaatccacccacctcagcctcctgagcagctgggactacaggcgtgtaccaccacacctggctaattttctgtattttttgtagagatggggtttcgccacgttgccctagctggtctcgaactcctgggctcaagcaataatcctgtctcagcctcccaaagtgctgggattacaggcgtgagccaccacacctggcacatattatgtatatttaaatatgtatacatatccacagaaaagcctagaaggatatattctaacagttaacaaaaggtcctgggaatgggattaggatgaagggagagagtaggtattttgcttttttagtttatgtacatttgtaagacttacttttttgcaataaataatgagttttatcataataattaaggatcacaggcatttaagaagtgaataatatattagcatcactgactcttacctgtaattttgtgtttccgtctgggtgttcttttcagtgaaacactgtcttgttgttaggctgctactgtttttgacttgagtatatgatatgaattatcacctctccatatctgtttttccatcagtgtcatcataagagtatcttttcactgaaatattaagaaacattaagcaagtatagtggtgttaattagattaattcatccctctttttaaaggtgcaaaactctttttctgtaaaagtcaagctgatgtaaatgcaaatatcaggttttcaattaatttctggctttctggaagaaagtgaaattattgtttatcatttcatttaatctggactaaatatttggagtattgaattatttctatgactttcatttgatggtttcatgtatctactttagatgcagataattgaatattatagttccaaatgctttaacgttccacattagtgaaacaatgatctacaccataatgaaaacagtaacacatttattttctttctgtttgtacttcaattccaaaagttaagcattaaattggctttagtcatacttatgctttgatgatagtccagcttcttggtgtgaaatcaagatgtgaagaaagttagacacacctgtgaaagcccagccttcactttcacatatgtgggtaataacttagtccagttatagtttgttaactaaaaaaacaatttctttgaagtataattaggtgataatgataattttaaaatgtgctaaaaaattctttttggctgaaaaattttggtaaagtgtttagttaagatgaggtgttgtgtctctgtcaataaaagatgcatggattaatgtatagtccctgtcatcttctccagccttcagcagtgactattccgggaccgtatggggtaactggttgctaggcaggcagagtgttctgttctgttctccttgtctgtggcatgtgattgagtcaggagtgttggtaaagtcttctttgaagatgaagcatagaataatagcatgcaaaacattttatcctttttatccttcagctatttgtctctagccttcagtgagtgggtgccccaacctaaagacaacatgctgtgttattactaacatactggagggagctgtgcacatacaaatgaccctgtctctttttgtgccctggaaccttgtcttcccctaggtggactctgtgacccacagagccatcagaagaaatcacctttgcttatcaagtttttgttctttatcttttaaagacataacttctctacctactgtttctgctacttgaaacatattcctctcattgtaatttgagaaacaaaaggataattttatgaggacattttcagtgttcatgctgaagccctggtgatccttgtcaacttgaatttatgcatttatctttccacactcaggcacttcctttcatcagatggatttctggcctaccggcagtcagttatttcctaacatattaggtggcagattttgtgggatttaatttgagcataatcttattgtgtacagattgctttgaagtttcttcaggactcactaaaccttctacacatcaatttttctgccctgtatgggtttttccaaagtttagcctccttaaaacaaacaaacaacaacaacaaaaaaccttatcagtttcactgcagcactccacttaaaacaataaagtttagtttgttttcaagtgctttaaatccattgatgtttctaggaacttttggatgaatgatctgttgaccacccacccaagtttccaggggtgcccctggggtccaccctggtgtccagggattgctttgcctccccacagccagttgggtgcagtgactctccatttgtctttctcagtgcaatcgcttccatactaagggcctggcttgaccagtgtgcagaagacttccgagagccccctcacttcccttgcttacagaaactgctggattatctcacacggatgatgccgggctctgacccagaaagaagagcacaaaatcttcttgagcagtttcagaagcaagaagtggaaactgacagtgagtacttgtttgttcccagggaaaaggctagattctgattctccagcctccacgctggagaaaggttctccctgtgctggctaataggaaaccttggtaccctcaaaacaacatgctgctggaggattggcttgagtataaaattctcaagattactgaagtactaattagagagcctagaattttagacagagaagggtattttcaagactacctaatctggctccctcattttatggatgaggaaactgtggaaactccagctcagaaaaattaagtaatttcctggggtttcttctgttaccaagaagagggtctccttgatgaactttaatcttcccttatcaacatgtaccatgctgaacctgaatttgcattttattacctgtttaatggctccttctagccttccatcacaaccactcccgtctagcagtcaaggaatgaagtctagttctgatcctgccctcccaaaagcttggaaaaggtgtttgtccttcagtatggaaaagcatcactgtaacgggtcccctgccagtgcagattgtcatcatttagcatctataagggcctcatcaaaggaagtttctgcagctgtttttccctatttgaagattaacttcctatttgcaaggacaaaggaaaggccaccactgcaggttatgaggtgcttggaactattaggctttgaagaaagtcagaaagaggctgggacaggcttccagtgtgatgttgtatcctctcactggggtgctgggtgacagtttccatggtggctgacccacttggagcttctgacaggcattaccctgaagggatgcctgacttcatcagtaagggaaaggaaatgttcctcagcaccaataaggaaagctgcatcagctccaaagaaaatagacctaaattccaaacaatacctgctgaatttcttatggatgggggtcccagagagagggaaatgcaattgcatcattggaagctgactgccaaatactctatatctcagatgacttcatctgccaggaatgtttgaataccaggggcactcctccagctgcggacctcagctcccttcagggcctccatgcctggctttgtgctggagtgggaaacgctgtgttggagcccagctctccccactggggctgcccctggctctgagcctaattggggaaccggtgggaccagtcattcattgtttccaacacagggactgcaaggcagagctcatttggcaggctgaggcaggggagagggagattgcctcagttcccatgtgcttgttttacccaattttactcctgcggaagaagcaagctctcctatatgtttttaaaaagtaaaatcgtgcttcatgttgttacttatctctggaggagaatcaaaagcagaaaacagtgaaggcatggactatgccccagagagaaaggatcatgtaatcttcatgcacagcaacattatagacacacattgggctgctgtgtttgctgaatgaatgaatggaaagatcaagccttagcacataccctgctccttgactgaagtgggttaggctctgcattgcagggcaaatgggatatatgtatgtatttgttgacaagacgagggagaggccgtttctgaacctttatttgggatcccaagtttctaattacacctctaaattaaacagtgccagagttgtatggaggaagaatgatgaaattagattgcttaacatcctccatgtcatggggttttagcttcctttagcttgtacctgtttgtgtcgcagactccggggataggcagtgatccccttctacgtttttcagtcataacccaaccccattggcatctggaacttcaagtccagggtaaaggggcaatcctcaaatcacatacctgccaccagtataggcagataaccacatgctgccctaaaggggaagtggtgtagggtccactctcggaagctccttttccctggaaaatgaaggaaagccactgtgacttaatccaagatgcccaatagtctttaattctacaaagaaagaaagaaaaggctcaaaatataagcattctgggggagtagtaacatgctgatttacatttctgctaagatataactgaatgtaactagagttttctttccttgagaacaggtttgacaggaaggagtgtgaggggtgtgaaggggctgaggttgggaaacaacccgagcactggggaaaggttccaggaaaggaaggctggggatttaagtcagaaaaccttcatcaaattccagtctttcaaaatggagactggaggtcctattccaggtgtgggctcttctgctttttattcggaatcctgggtactgattttctcttcttcatgctgtgccctatgtaatttgctaattgatgatcttggctgtgataggttcaggtgaatttagttgaagactgttctgcttcatgcattcttagctttgggtggaagttgaaagtgactctgaacattttgagaattttgagggcttcgtcagcatttctaacaccaaaatggctcattttattgcccaaagtcatacctgccttcatggcgagtccttccaggcttctggttataagtcgcccagcaaccaaaaattgcatggttggggtttaggagttagttggattagtcctggagctgatctgatcaaaaagtttgaaagagccctagacaaagggctctctctagactttgcctatcctggctctgtccttggcctaggagccagtgatttgtcagagtgagagcatgagggctctgatcttaatagagaatctaagaacaagcagagatgggaagatctccattgttctcagatgcattgtgcttgtggttgtctccctgtggctgttctggaggattggccctcttcttcctaaacaaggagtaaagtctgatgactctataagcaagattatatacactggcgccaaattactaatcttttccatatgtgaacagatgggcttcccaacacgatctccttcagcctggaagaggaagaggaactggagggtggagagtcagcagaattcacgtgcttctcagaagatctcgtggcagagcagctgacctacatggatgcagtatgtcttctctttgtgatcagatgtactttcacttaaaacataggggagtgatggcactggtgccccggtgacagcagtgggataatgtgattttaagtcttcttgaatccttgagacaggctgcgcctgcagatacagagttaagatgtgtcttgaatcaatcatctgaataattcaggcctgagctcttcttgcaactctaggagaaggtgcttttggagctcaagacacagagggaaataagaattcgaatccctgtgaaacaaaatctgccttgttctgtgggtatttttctccctttacactcataaatatttcaagatctgaactgtttatttggaggattgtaaagggatcaaagtataagttagaataaaataaattcacagaatccacatgtgattgtatctggcccctcatttccacgtgtgctttctgtacttttgaagtttgaatatttttgtgagctggacatatttgagtatgtcagtcagatttcataggtcggtgttagatggtaaatacaagaggactgtgaggagttatcgtggtggctttagctcttctgctttatcacttttgacaaggcagtgtggaacagggtggagattttccttctagtgaacattatcgatgagtatattaattatttacttttgtctgttgaaatggacaccatgagacaaatcaagtagaaaaggattatctggccattcacaaaaataccaatttacaaatgacccagatgacatgctttgccatatgaaatgtctgtgttgtccttaaagtcagttcctcttttgttccagcaactcttcaagaaagtagtgcctcaccactgcctgggctgcatttggtctcgaagggataagaaggaaaacaaacatttggctcctacgatccgtgccaccatctctcagtttaataccctcaccaaatgtgttgtcagcaccatcctggggggcaaagaactcaaaactcagcagagagccaaaatcattgagaagtggatcaacatcgctcatgtaattgtcttttataaaatattctttgtgtttggtagatgcaagagactgctccatcacttcgtttaaatggtttagctgtttggttgaaaaggcagtcaaaagaccatatatgagagcccactgggtttttgttgttcttccagagtaagaaaaaagttgcctttctaaacttggcagcttatttattttcctcttttttaaaaaattggacccctgctcacttcttcccagttatgggctctcacactgctacctctctagagtgagacattctgtctgctttcccctttgtattcacgacaagactgagtgttggtttcagcaccatgttcagtaaatataaatgtatggtctgcatgtcaaaacagactgcccttcaacccagagtgattacctatgccccctcccagtacctggaggcattacatcttctgcagttttgaagagctggtacttcttcagagtcctgaatctcttttctaaaggactgagacacttacagagatctcatattaatctgaggtcatgtctcatattaatctgaagttggaggggaggagtctgttcctaggcctgactcacattcttctgagtgttggagtctagtctcttggatgaactgcttacataccataggacctccccttctcagcatcttatctcatgactgagaaaatggcaacagtgtgcagtcagtgggccaccaaatattttgtgaacttctaatgtgtgtaaaccacaatattctgtacttaggggacatactaggatagagcataattatttgtttgcaggaacccgtacacaaacaaggaagctaagatatactggaattatctcagcctgagacagtagaggagtagggccatgggagataagcactgtaaaagtgggggagagagaaatcatttctgatgggatgatcaaggaaggtttcatggatgaattgacatttgaaattaactttgagtaacagataggatttttggtatttgaagattagagaggtttttttttttctaggcaaaagaaattacatcagcaaaataatgattttgaaaaattattaatatgaaaatatcatattaatttgtgttctgggctctatgggtaaactctcaaccaaaacacattttgctttatgtccccttaaatatatttttccttgagcccctattgatagggcataatgttacattctcttttgctgtctttgattaaagagcagagacacaattgtgccagataatttgccttgagtcttcaggtggtctgttattacagacttcttagtgtattatgaaagtcagcaagaaacaaagagtgtaagttgcataaacaacttctatttctcctattctaaatcgagcttattgctcagcaagtaagagatacaaaagaagttgtgagtgagatatagtgtagaagttctctgtttttttagaatgataaggaattatttttttttttgccataagtgtcacagcatgtctcaaaagcagactgtctacccctaattcattcaactactttggctatagtgacaatatagcatctgtgtatgtgacatagtggggctcaagcgatgacttttggtccaaattgaatgtaaattgtgcatttatgtagtaataagaaatgcaagttgaatcatttgaagtatatttcaaatcccatatcatgtgctaataaagccaagggctcttactttttttttggtgatatcacttcctaatactgagtatgttgtatcttttacaattgtgtagggaaatgtaataaaataatgaggcttaccagtggtttgctaccaagatttattttacctttcctgcattcatcgtagtcaatttctattgaaaggatatttgaaaaagaaaatttttctgacctaatatgactatattttcttggactgcccttaatggtatgtttttacttttgcatcacatctcctggaagatgcctctttttctagaaatgggaccagatgccttttgtactcctttaaacccttagtttaaacctctttttgaataatgtgttccatgtgtttatttcaatttgcatgatgtatctgttcctgagttcctttttttattgcaagtttcctgatttttagaatataacttttgtgaacctttgttgaaccatgctcccataggcttagtttccagattgcaattcagaacatttctcttgttctctctctcttcccctccctccctccctcttttcctccctccctccctccttcccctccttcttctctctttctctttatatctttccaaataaggggaggacattgaggcatttaaaaagggtggacatgacttttattaagtactttggcatttactctaaagaaaatgtttgagggtttgtttggcatagttttcagtgtccagattttggcatgctaaattagagtgctgtttttccttcgtattcaggattaacatttctttgtgaaatgattctcgaagtgatttacatttatgcccaatcactctgggacttcttacctgagatactctacacaaaaccaaatacgtgctcacatggtgtactcacttgtaaacactgggcctagtacgctgtcatgtgcctgtatatgaagcatctcctttgacataaggcctggtccagtctcctcacgttgctaccttccccatgccagccaagaatgggactttctccctgtctgttttgctgtccctgctattcagtcacaggactttgactccaaggtcactaactgctgatgctacaggctccttatggtagcttaagtttaaatagggagcctctctccttacccagaaaatggcatccagaatgtttcctgttctctttctattttgttttaaaacattgccaaaatgaattttattttaaaaggccgagttattttggaagcattgaagtaccaaggtgtttttgaatgtttatggttgcaggacaagccaatttgaaaccaaatgaatgtgtataaaaatatccccccttggctaagagcataaaagccaaagttcaacttgtggtgaatttttattgccaaattatatacacctctgtggacaagggttggtgatgagatgttcaataccatctgacctcaaagtggctgctgcccagctcattttgggatctaaagaagatctaaagtgcatatttttaggacatctgtgtgctttcagcagaagaaagttgctctttctagcatagctctgtagacttacctccattagtgtttttactaggaaagctggaaactataaaactgtaacaacaacacaaaaaaatatattgacgagagaaaaacaagcatactgtgccaaaatctataaagtgtttcgatgactggggtgggaggaaggagccactttttgatgttcactatttatacagctgcctattttgtggtaagaattcatagcagctgtgatacctctaaaacaggaaaccaccaagtcattgtaatattgatagttaaatgccttttatgttttaatcactccccatgcaggaatgtagactcctgaagaatttttcctccttgagggccatcgtttcggcactgcagtctaattccatctatcggttaaaaaagacttgggctgccgtcccaaggtaagttcccaagtgtttgctctgcttttctttggccgggataattagtggttgtgatgagtcctcaccttcaaagcttgtatcgcataactagagaaacatatttgaaatcctctgtgtgtttcaggcagggtgcatcttacacataatcattaatgacttttgaggcagggctcctgcagaaatcaaactcattctaagtataccaaagccaagattattggctttggggatgatttgaaggatgtgcttattatctggattttgagggataaggttgtggagtgatgaagttacagcaatttgccattacttctggttatttttcagcctcactacaaagccctaagctattttaggactcaaggggtaatgtgtgcagataggacattagttcttgatgttcagtaggaaactatttagttgtccttttagtttcagcattttaaaaactatcttattggcattaaaaacctttaaatgttctttcctaagtacctgaaattattaactggccacatcctatgctgtttttcttcatatttcttggtgcaaccgttggaataattaacaacttggtttcctgatttttgcactactgccatcacttccatttccggaacttcactgtagatcaaagaactttgtgcaaaggaaggaaaggtgagggagggggcagttctgattctctgtcactacagatttagaggctggggattgtgtcatgagtacaactaggccagctacattcaacaagtttgcccaggtttgaactagtcaggaagttaggctatatcagggaagaatctataaattctgtatggtctataccacatgtggtatagtcagtttcagttaggaggagagggatgccagctggcttcccagccaggctgccttagtggggcagaatggaaggtctgggtcctcagtttcataagtttactcagagttgatcaagccctaagagactggcattgtttgaatttgcaagagccccaagctggtaaaccagagtttcataaatttatgctgaaaaatgagtgccagaatcctcaagcttgctgataagctcatattctcgttcaggggatagtctacttggtgtaagccaaattatttattaggtgattctttgatgggtaaaaagaaaaaaataaagtggatgtttataatgcctcatgttacagagctgtagaagccacagctacttgcactccaaagctcgtgctttgtttatgacatcaatatttatcagtagaagaactagcaggcttttcaaagaccaatgcaattttcttgattattattctttttttaggttctttcttctctattttgaataatcaaggtgattgtgtgtattaaagagagattagttggttgattttcctctgcacatttctccttaagaacgatggggtcatataaaatcattacttgataggccctggtgaaatgcgatgggaaaatcagaagcatgcagtgtccccacccttcacacctccacttcacctcttctttcccttaccaccactctccactcaactgtagtatagtatcaaaaacaaagggacagtcaagtgttaaaatgtagccttactcaattgattgcaaccttgtctgattgccacgaaaggtaatcctttctttgatggttgaaaaaagaacactaaggaaagtcacgtaaccagcctaagatttcttccacagcaagtttgagactaaaacatgagcaaaaaaaattaatggacttgtatcttagtctccttggctgccatatgaaaagatttattctagctggcttttaaaactattttctaaagacaaaggaaaaaccctctaagctgcattctgtgtaacatatgtttctggtttgtttcttagttggtttgtatgtgttttagcaaggacactacagaagtgtcacagttccttagagaacacacttctatatcagctttacatgttctccattgctaaattcaaggaacaggattaagataacttatttggacatggtacatctatacagtggaatattttgcaggcataaaaggagtgtagtactgatacatggtgtaacatgaaggaaccttgaaaacatgctaaatttaaaaagccagccacaacagctacgtatcatatacttggacttgtatatgaaatgtccagaatcagcaaatctatggacacggaatgtagatcagtggttacctagggctgggactgggaggacggtagggtcccagggtgatagctaaagggtagagggctgctttttggggtgataaaatattctaaagttgattatggggatgactgcacaactctgtgaatatactaaaaagcattggactgtatacttcaatgatatgtggattatatctcaataaagctgttattgtaagaaaaaagatatcttatttggttatcactttccctataatccttgacatttgtcgctttaagtagacaaagggaatacctatttatttctcttcatttagggccacatataattaattttgaaattattttctccaaatatgaatagcttaatggttttctttattatttagagtaatattacactcactataaaacaggctcttaataatggtttttttcataataatgaaaatgttgcatatatagtgatattgcccctattaattctttgtcttcagaatcatgcactcattaaccctggagggtgtgtagagaaaaccatgaggctcacagagatgtagtgtcctggaaagggagaggggcagagcagatgctttgcatatgtggtttcactcactgtcccagcagtcccataaaagcactgtcatatttcccttgtagaggtgagaacattgaagctcaggaaagttaagcagcttgtccaggatcattcagaaagtgagtggagagatgcaattggaactcaccacccctggttgcagagcccatccggttccaccattctctgactctgggagtagaaatagtggcctgtgagccagaaaatttggcttccatacctacaaccctcagcagttattcgtggaaatttgggaaaatccctggttctggcatcgtcatctctaaacttaggggcctggccaagatgacctctcagatctgtgggctctgtgtgtgtaacagtttttttttttttttttttttttttttgtttaactcactgagaagaacatgtcctaattgaacaacttgatgccccaattgaataatccttttttatgattataatatgcatggctagggaaatatacctctctccacaggggtggccaagtccaccttaaaagaaataaaaagccatcccgcataaaaaaaaatcatgggccttatctgtgcttacagtacccaccaaccctgagatcagcacagtccctccttagacatgagtcctgaggacagctgggccaaaagtgtcgggttattcctaactcttcattgttaatattttcttaatcccttttcatagggaccgaatgctgatgtttgaagaactttcagatatcttctcagaccataataaccatttgaccagccgagaactactgatgaaggtgaggctcttagtgaggctgctgtgtagtgctgttaatagctctggaatccattcaaggaagagtagtgtgagggctccttaagttccttcaactccaaagaaagcctaaagtaactagaaggcaaaaaatttttttaaatgcagaatctaagaaacttggggctgagaaaattctaagtccagttgagctctctctttctacctcccttagcttgcctgttatgcaagcagattgtgaaacttgagttcatatgtgtatgtacctccttaacaagctactctgcaaataccaagtgctggcagttaggtgggtgagaggccctggaatattccttctcagcaaaacatctagaatgacagaggccaagcctgcctgcaattccacatcctttatttggactaaattgcacaatctgtcagtcagcagtatttattgaacaccaagtaagtgctgacttctgaatgacacactaggtaaagatatagcttagttcattttatgtctccagacatttgttgaatgcctaatatttgtaaagctttgaacctgcttctagaaatatgaaggtgactaacacaaacactgtttcctggagtttaccatctaattggggtatatagacactaaacaacaagaataaatagtcaaataaagacaactaacaggttgtgaacaaccatcagaggggaactagcatagaccaaatattatcctcatagtctttctataaagtagattttatcatcatcattttgtagatagccaagactcagagagggtaataacctgccctaaggcatacaaccaataggtggtagagctaaaatatgaatgtaatgtggtgagactctaaaacctgtgcttttatcaccaagacataaagctatttcttctgacctttttggagtaaggtgcaggatggatcagatccagcttcatagagaaggtaaattagtagttcagtaaatattggttgagcacccactaggtattggggataaaaccatattaaaggcagtgtttgatcttaaggggattacagtctcatgtgggaggtaaaacatttataaaatagtgtgataggtcctaccataggggaaagtcctgaactgggcaatcaaaagttgtgattcttatccttaatctccttttctataaatgggagccaatcaaagtatttggtctgttgacttcatagaattgttttgaagattcactatggtaaaatacttgaaagtgctatgcaaatgtaagttattttttgtatttggtgagctatattcatgtaaaaccaaagtatgcataacaaatgaaaataaatagagaataagctgcatatttgagcttagggaagatacttggagtaggagtgaaaatcaggtagaggtggggttagtaagaaaaggcatccaggtgctaacccttaggttagtcgatcctataagggcatttgttaaggtcttcatgactgttcctgtcctatgtcctacttatccttcatgtctcagtgtagactcctccttttctggaagccttccttcattctcaggtctgtgctccaggagaagctgtcatttctctgtcctggcacttatcacttgctctgttgcaactgcctgtctctctactggtctgtaggcctcttgcaggcaggggctgtatgtatcttttcactttgtatccctaatgcccaaccagtgcctggcatgcagtaagtgttcagaagctattgtttggctgcatgaattgatgggtcttatcattcacatgactttttaacaatatgcccactattagcccttcttggagtaggtgatatgagaagggcagtatgtgctgatgtctgactttggatttggactacctgattaactgcacactaaacaatcattactgagatcgtgttactccctgcttcacatgcccctggctttgcatactttaaatggaaacccatctggctggaaggagatggcttagtggtctccctgtcagcagtacgaagctagactaactggagccacacattcaaatccaaacagtcctgagtcttccttccaaagtagataaattgaatactgtgcagctcattgcctggtagcagccttctggctgaaggcttagaagtgaagctgtatctagacattaaagatcccataaacctttcttaaatgcagaagttaccccccgtactctaaattaaatttcttatagatatgactcaaattccaaagaaatggaaaacttggctgtgaattcatgtggtctgtgcattatcattaatgatagtgaaatgctttgggcagtccatgtatatctgtaggtccttttccagtcatttttgttaatcattcttcatatgaagtgtctaattctgagtgtaaattgtcagcacattttttttttaaatggaatcacaaggtacttagtttctcaaaagagtcactaggaaaaactaccggcctctgtttctagtgttactcctggttttatacggatttatggttgggtaacaatataatagtttcattttattttattttttgtagatatgtagtctcattatttttctcaggctggtctcaaattcttggactcttagttttaaatgacctaacttctcttcttctgggaagatgtaacgtgccacttatataatatggcccaggcaacatgattattagcaaaaatctgtggttttccttttaattgtttttaaaaatgtttcatttcctctcaaagactatcttaaacctgctatgtccttgtgatttctgaaacctgggtaattctaagcaggtgaattatagtctggaaatttcaagacatcagggaagaaagcagaatgccagcaaatcttggttctcatgattcttggtaagaattttttcggttgactttatataaaggactgctagaaagccccagaaattcaaccctgatggagacgtatgttcagtgacactccaaaacatgctaaactcaaagttagagcaagagtctgttacaactgtgacagttctgagctataattgctggtagctactgagcttaagttaaccaacatttatggagatggatccagagtccagtagacaagttccatctagacctagtagaagagggccctctgaagcccaagaacagcatggatgagggtagctgaactctgctaaagatggttataaagaaaaggtgagacttaagcaagccatttgcactaagagacggagagggaagagaagggcagagggggagataaaaggagagagagagggagaaggagattgatggaggaagagggagatttggcatttatccaaacataggtgatgattaaaatcatgagattggatagtatttccaaagacatgagtacagcagaaaacaagaggataactttgacaaaaagaagaatcactaagagaatatgagaacagcagaggaggcagggggagagaatgagtgatacagtcacaaaaacctatgaaaactttcaagaaggttcaagggattggtgttgtgcgacattgcagagtaggagatttggggctgaggaaggaaaaactgaaactgctggatgtggcaggtaagtggattttcagttgacacctcatttggaataatagggactcgtcggtctttttagatctctagcagggatggaatctcattctcatgaaatcataaagtcatggaatcaacaagtcttgtagctccccatctcaggcgtttctctctcctatctaatgaggaggttgtcttaagtgctcttttgagatccctttcacctctgttattctgtgattcttaggagcctttgaacttttcagaaattctctttaggaattttagccatgtctacaataacttatgatacattattcctctgcccataactgacatactggagggagaccagaaggacctacacaccggaaagaggtgggcactcttattcaagtcagacataattgatttctcactctaagcaaattctcaagaatttcggaggactcacaactatctagcacaggaaaggcgcatattaggctgctttcttttttttagaggtggggtctcactatgttgctcaagttggacttgaactcctgggctcaagcgaccctcctgcctcagccttctgagtagctaggattacaggcgcatgccgccatgtccagtataggctattttcattcatccctgtgaaaaactatgaatgggagatcattaaatagtggctctctttattatcatttgtgatgggaagaacttaaataggtaatgagtcactgtgggttctgtcccagtagtgtacctgggacctgagttaaggctgagagatggaacatgttgatgctctatcactatcagcaaggccaagccactgaaaaaaacccttttgtggttgtacagtagtggaaggtcacgtgctatggtaatacataaatctcaggaaaagtgactaaggaaaaactagtgtagaagttatatactactgaattgtgcaatttacccccccattcatgcagttcctggaaaatgagaacttaacaagaccccaaaaccgcaaaagcacttaatgttcagtcagcaaactcatgattactcattatatagaagagtttgttgttacaatagacaggaggagagaaagggtagccatgtgtcctcaggcaccaggaggaaggattgatttgtaagagttccaaacctgagaggcaatttagaagaactgactgggggctggggatgtgtgaaagttcgacttttatggattggtcatgtagtacaatattggacttcctcagaaaacttccggtgcaaaagtttcatttagctaagaaatgctacagaagtagtccctttctttcacagaatgctggcacatccatttcaggccaagatcgagaaatcacaaaatgtactgaggaagtcgatctttgttttcaggatatctgattactttgagtttaatttgggatctgtaaaaatgtcttcatttatgagaattgcctggcttgtattgatgattgctttcataaccaaatcaggtgatcttcttacaaagtaaggggaaggccaggtgtggtggctggctcatgcctgtaatcccagcacttggggaagctgaggcaggtggatgatctgagatcaggagttcaagaccagcctggccaacatggcgaaaccccatctctactaaaaacaaaaaataaaataaaatataaaaattagccaggtggtggcgcattcctctaatcccagctactcgggaggctgaggcaggagaatcacttgaacctgggaggcagaggttgcagtgagctgagattgcgccactgcactccagccttcccagcagagtgagacttcgtctcaaaaaaaaaaaaaacaaagttgggggaagaacaagaaaatccaagtccaccagcctcgttataaataggcaacttgcaacaagccagccaagtatttgcataatatacatcgtgagagcctgctggaggcctcttcattttgcatggtgttccgagcgagagttatgcagggttgtgtgcgagaaactagatgcctctttacttcttaccattgtggcatcctgtatcaattccctctgtgtgcatttctgtttctcaggaaggaacctcaaaatttgcaaacctggacagcagtgtgaaagaaaaccagaagcgtacccagaggcggctgcagctccagaaggacatggtatgtctggccctcgtcttccctgacagctcacagaggagaagggccgtgtgcgtctgggctcccacatggcactggcaccttcagtcaacagggcacccaggctttcagaaagggtctcccattctctaccccatttgttctcagcagccctgggaggtctataggagagagatgattaccctcattcaactagtaggaagtaagcactgggtggcaaatcctgttttctggcaaagttgttttctgaaggtgagggggagtctacagcaggtcgacttcctccctcttgcagtctcttccgccccctcctgcacttagaagctgctccaccttggcctgagggcctcctgagcttcctactgtagtcagcttctgatacatggtgaccaaggagaaagagtgtcttctccacagggccctggtccttgtactcagagatcttttcatttgttctaatctagccattgcccagctctccttactaatcccaaggctaaccaaatctttatagtttttcaatatttaaaggagcatcatgcctccctcctgaagactgaaagataggtattatcaactttagcttcattttaaacttctgactgttagcataaagtgtggaagaccagagggaggagattagagactgacaaactctaaatattctgctttaagagggttttctctttctttggaaagctcaacgtaagtaagaaatgtttttgaatgataggactcttccgcaacatgaagcctataaaacattcacagtgttacaaacttttttggttgttcaaagacaagctaaaaatagctgttaccaaaaaaatagattattttagtacaggatgagaccttgtacacagaatgggaaggacacactgcagctgacagtgagttcctgaaggacaaaaccctccttggtatgaacctcacaaagcagttctggctgaggaagcagccagcctcatgtcaagcagcctggctttaccctgtttgaggctttgtgttctgccaaaatttccagaattggcttgatgagatttaggataagggatccatggggaccgctttttacttttcctttaggatgtttagtgccttggtggcttactgaagaagagagatgattttaaaggagatttagtgaaatgaatatagtgtatccctgcagttgtaggtagaagtgcctccaccttcatttccaactttttattctggaataagtttagatttacagaaaagctgcaaagctagaagtgcagtttccctcattgttaacatcttctaaaaccatagcacatttgtcaatactaagaaactgacactggcataatactattaactaaaatctagactttgtttggatttcaccagttttccactagtatcttcttatctgttccaggacccaatccggcataccaactgcattttgttgtctgtcacccctgtctcttcaggtctacgacagtgttttcttgactgttttttatgaccttggttgtcttaaggggtctatccaggtattctgtagaatgttccacagtttgaggttgtctgctgttttctagtgattagactgagcttctggatttttagaaagaatatcacagagtaaagtgcccttctcatcacatcacatcaaggagtgaatgaatggtttcagcgtgacatctggtgtcatgttgatggtgacacgaatgatgttgatctttattacttggttaaggaagagtttgccaggttcttcctcagaagttactgtttttctctttccctcctctattatttgagagttagtcaccaagtctagcccaaggggttatattaatagtgatgccccatgcttttgtggtacatacttctctgtgtacaacagccaatggtgaggcaatgactatccagtgccatccccaactaccaggaatgtccccatgctctgaaagagaacagacatccttctcacttgagccaaagcaaaacataaaccccacagtcaacacttttgaacagatgtgtatgatctcctggctttgaggcttggttttcatgatttcacaagttagatattagatcatggagtttctatcctatttgtgtagaaatttaaaaaatgttattcatggaggttagcaccactggcccgcagttaggccttgaatacatccatttgctccagcttgaagattcctaaaacccctcaacttttcaatgacaataaagacagttttgctttggatgctcttcagggtgtgatgcagggaactgtgccctacctgggcaccttcctgactgacctgaccatgcttgacactgcccttcaggactacatcgaggtgagttccatgtgggtggtgtgatcgggcctgcagccttcccactggataccctaaagagtagttaacttctcttagtatcttttgaaggtccaaaagtacatggcattgtgctagctgttaggaggaatacaaagaataacaccaaagactaacaccagaagtggctcaaaatccagtggaagtaattaatatatcaaaataagcagtgaacgatagtaataatcgaaattcaaacaaatgcattgagagaacatgggagatgacaattattattatttttttgagatggagttttgctcttgttgtccaagctggagtgcaatggcacgatcttggctcactgcaatctctgcctctcgggttcaagcaattctcctgcctcagcctcccaagtagctgggattacaggcgtgcaccaccacgcccagctaattttttgtatttttagtagaaacagggtttcaccatattagccaggctagccttgaactcctgaccacaggtgatccgcccaccttggccttccaaagtgctgggattacaggcgttgagccactgcacccggcccacaatgaactcttatgaggggttgtgatgaacagggctcatgaaggagtgggtttgggtttgaacaagactttaaggccgggcgcgatgtctcatgcctgtaatcccagcactttaagaggtcaaggcaggtgaatcacctgaggtcaggagttcaagaccagcctggccaacatggtgaaaccccgtctctactaaaaatacaaaaattaggctgggtgtggtggctcacgcctgtaatcccagcactttgggaggctgagacaggcagatcatgaggtcaggagttcgagaccaccctggccaacatggtgaaaccccatctctactaaaaacacaaaaatcagccgggcatggtgacacatgcctgtagtcccagctactcaggaggttgaggcagaagaattgcttgaacccgagaggcggaggttgcagtgagccgagattgcgccactgcacttcagcctgggtgacagagcaagaccccatctcaaaaaaaagaaaaagaataaataaataaaaatacaaaaattagccggtcatggtggcaggtgcctataatcccaactactctggaggctgaggcaggagaatcacttgagctcgggaggcagaggttgcagtgagccgagatcgtgtcattgcacgatctaggtgcccagcctaggtgccagagtgagactcggtctcaaacaaaaacaaacaaacaaacaaacaaaaaaccccacaagactttaatgttgagtaggactacttggtggggtagagagtcagtcaaatttgtgatttttcaaatatgcttttctttttgtattgctgcctgctgtggggtatttttctctctctctgtctctctctctctctgtccccttgtccctctttctctctgttccccctctctctacccctactcccttcatcccccatcttctctgaaagggaaaatacatgaaaactcagataaacaacttgttagtagcagcaataaaatattaagtgaagaagaaatttcaaatttgaaatgaaattgaaagattgcttgcatatttcagtatatactacccccttgttatcatatgcaaccagcctgcttttattgtatcttaattagaagaagtagaagttactttgcatagatctacctacctttggatttgccacagtgttgtggacacatttattcattttgcatctcctgacttctatgtctcttcacatcctctttctcagcttatctcaggaaacacccatcagtgttggggaattctggggagtaaccaaagatttagaagttaaattcagcctactgagaataggagctgaggggatgaagaattgaaacttaacttttcatgatgctatggagaaatgacttcccttttgataaaccgtatgagtcaatgaccatctgttttagttgcttttggtaagggaaaaaagtgtaatggaatatttactcaagcttttatctttactggttctgcaagtgtctttggatcctgatttgtaattatttatcattactattttagttggtttcagacatttcaagagaaggctttctgcttatcctgccttataataatactttttttaaaagcaaaacaggactctcttcttccacagtagtcgtaattataggatcattgataattgtgactttatcacccctttgatctattttaatgtgacctacgacaacatatggctgtgttttaaagtagcttggttgctcactctttttattaaaatttcttttagggtggactgataaactttgagaaaaggagaagggtaagtagagttgttggctgtgtttcctttgtctgagcatgaaaaaaatgaaagaaatggggacttaagtttttttgtagaggcagaaaaaaatgagttagcacctactgaacgtttatcatataccattttgcttggcattctcctatacattatcccccactagccttatgaggtaggttttatcatcctcaattcaaaggtgaggaagctaggactcaagagattaaattactggacgagaatctcttggtggcaaagccagggttctcatcctgtcctgatgccccaaagcccacatttcttccctgcccactccttatctcctttacaattagcttcagcaatagcaggcttgccacttaattaataacaatgtattttatacttgaagattactaagagtagactttaagtattctcatcacaaataaatatgtgaagtaatgcatatgttagttagcctgatttagccattccacggtatatacatgtttcagaacatcatgttgcacaccataaatacaaacaattttttaatttgccaattaaaataaaaaccaggtttaccctattaaggataaggggtttctgatgagtaaatgacatagaagagttaataaagatggtaaactctcgtgggtatactcgagagaggaaaggaaatggccttcgtcttcggtgtaggtagttattctttccctttcgtgtcagcataggaaggtgtgctcaacatcaatttcactcttcctgtggatagcacagttctgaactgtgctattcaagataaaacagtcttgaaatttttctgtgattttcatattcaaatggcatatttaaatagatatttaaaagactcaaaggaaaatgagtgagcaaaataataacttcaccctgtagtactctcgttatttttcagtactttcacattccacaaatattgactgtctacctaacatggggggggtttgggaattacagcagagaaagaacagagctgcctgccctcgtaaagttcacaatccaggagagaggtagacaaataaataggcagttataatacaacctgaaaagggtttgtgagcagaagtagtgggtgttagagaagtatataggtggggtatctatctccaacttgtagggccagagaaacttccaggagaaaatgacgttgaagttaaaaccaaaaaggcatagaggagctaaacaaagctgggcttatcagaacaagatactaacctggacaaatgtaaattttttgtcccatatagacgatacttttttctttagcatgatggtaaatattccttgaggatactgagaccaagggccgaggtcactggatggcaagttgagacttggagaatctaccagttcttgagttacttctgtcatgtcctgtaatgataataaattcagttattgccccctcagttcccctctctgtcatttaacttcagaataactgtggttggtaatctctttcctttttagactaggatattaaacttctggaaagtttgactgtaaaacctaaacctaaagcttatacccattgctgacttaaattttttttattgaaacatccaaataagtataaataattttcaacataattatgtacttgcctctctgtgagttttaaaagacttagttaaatgatttagtggcgtagtaaaaacccaaggattcaggaaatctaaacattcaattttatgagacctaggactgtttagatactcagccctaccaaaacttatttattgaggggtaaaggttgaggaagatggggatggggatcttgggagctccctgacttaaagtatttcttttcttttttttaagaaatatgaatagaaattaatatattttatgaagtacttaaaaccttaaaaatcatttttctattccaaggatgaaagtgaagaagagaaaaaggaagccactgtaacttaacgtagtgactagtttgggttgctttggtagcttgttttatacaaattgctttctcaaggagaaaagaggattaaaaattaaagcatacaaggactttggagagttctagttagaatttttaagagttagttagctcctttatttttaaggaagcagtatttcagaatcctcctagatggttttcttcatcttttatcctaatgtggtatattttcatgttgaaagattctatatttggttggccttattattcagtcttttttttttaatttttggtattctgtctgctttaggaatttgaagtgattgcccagataaagctcttacagtctgcctgcaacagctattgcatgaccccagaccaaaagttcatccagtggttccagaggcagcagctcctgacagaggaggagaggtgggatcacctgtcgttcatcggggtagaactgaagtgttggcaagaaaaatgctgcatttaatacctcgctgggtcatttattcaacaactatttagtgagcagctgctaggttccaggtccttggttttcaaaggcgcatggtgtggcaggaaaggctgagttgatagcatcaagatgtactttcagactcttgcttggccacttatttatctttgtaaccttgaacaagtcatttgttcttccctatcttaaggatgctcatctgtagaatgtttgtgaggcgtaactaagatcttatgtgggaatgctttgttagaatgcttgtcctcagcgttgtcaccaccaccactgtcactgtgtttgtcattcctgttaattgatggtagctttccaggaagctttcaacctagaggggttgagagactcatgaaactttgaaatatgatgggtaactacattcctacaaaacctatgggaagaattggggaaaataaggaaaatataaaggcattaatatttaggctggctgtaaaggagaaacaagattttgccataagaaccggaagagaacattccagaccgagagagaacacaagcaaaagcttggtggcctgacatgtttggcatttgaaggaacagtgataactcaggtgtggcagggacacaaagaacagtttaaaaatagtgggatgggcatagaaaggcatgttcacttgagtgccctgcctgctggctcagcacgtccctgtcctgtagcctgctcgcttgttggcagattggtctgcaggccatatgtggcccactgcctgtttttacatttttaaatgattggggtgggggggaacaaaaaaagaatattttgtgacacgaaacagttatttgaaattcagatttcagtatctacataaatatggttttattgaaacacagcccgttcatttacatctcatctatggttgctttcatgctgtaaagacagagttgagtagttgcaacagagaccatatggcccacaaagcctaaaatactatgtgatcctttacagaagaagttggcccatccctaccctagcccaggggatttctttggaagtttatcataagggagagtgaaattgacagcaaaataagtatttacaaaaaaaaaaacttgaggtttagagaaatatttgaatgaattaatgacagcatttggattcaaactcaggtctgcccggctctacagcctaagctctgaagatggctgtataatgttgggcacccttccccacctactcagtaacgaaatacatctactgtctacagctacaagctttcataaaaggcacttggaatcacatataaattcctcttgtgcttgtgtcagttatatctgcctggcagatagaggtctgaatctggagcatttttaatttaggaagttttggcaattaaaaatttaaaaaagtatttgtaggccaccctggccaacatggtgaaaccccatctctactaaaataaataaatatatatatatatatctttatcagtaatgtaattgcctatgtctgttcattgacgatcagatagattacaaaagtctcttcattttctttagataaaactaagtcatttgtgcatgtgcacaaacacacatacaaaatagtaggaaggaggtaatagagaagaaataggagggggaggtagtagaggaaggaagattcttccactggcctagcagtgggatgagaatgatcagaatggagttagtttttgatgctgccaaagtgcatatatccttgtatttgaaacacgcagaactaaatagcctcaatccatatgccagtggaggtgagggaggaagcacataagataaatgtgtcaaatcgggccgtgaagtcagtaccccctgacgtttatgataggacaacgtttgtatatatctttactttgaacaattagagccttctctaaaacaaaaccaggacatcatgtgaatttaagtgtgtttttcaattctctaactttgacctcatggagcccccttctctttctcagctatgccctgtcatgtgagattgaagcagctgctgacgccagcaccacctcgcccaagcctcggaagagcatggtgaagagactcagcctgtgagtgtcccctgggggttctggggctccaagagggtgccatcagagtcgtgagaggagatgtattcaacaggatgaccttgagccagggtgaaagtgaagagcactccgctcatttgttaagccgtttatccttctgtcatgaactcaaagcatttgctgagtccattcttctccactcccctctctgttgtgaatcaccattctctcctgcctgaatcactccagtaacatcttcactgtcttctggctgccccttacccaaccattcattctccactaaatagctaggttgtcttttaaaatgtacaccagattatgttgcttcctgtataaaaacccctatagcttttattttaaaataaaacccaaactctgtatcctggtttactaggccttacatgacttaacctgcagacttccctctcttacaacattgccctctgttcaccagtgttgaagacgtttgcactggctgtgcctggcctgaaatgctctttcttcatgactggctccttcaaatattagcaaaaatgttatgtgccaagagagaaccctttctaatgttgctgtccacccctcattctcattcatactagctgcttcctccagtggaatgtaagcaacctgagaacaggaaccttgtctatcatgctcgcagttgtattgcctgaggccaggagtttgagaccagcctggacaatgtagtgagatcctgtctctacaaaaaaatatcacttaaaatattagctgggcatggtggtgcacgcatgtagtcccagctacttgggaggctgaggtgggagggttgcctgagcccaggagttcagtgttacagtgagctatttttgtgccactgcactctagcctggatgacagggcgagaccctgtctctaagaacaaaacaaaacaaaacaacaacaacaaatatatatatatatttatacacacatatatatatacacatacatatatatatgcagtacctagctctcaatatgtgcctgaaaaaccaccattatttttaatgaaatgaatcagttaatatctttttgaggatttggggggatcaggattctgactgtctttatgggcatttgatatttcccagcactgtctctccacctacttcagtgagtcacattgagacacaggcagggatggcacatgaccttgagtgttgccatgtccccggtgtaacataaagacctctgctggatgtggatagcaaggtctcccaccatcagcggccacgcaggctgctatctgccatcaggtgatatgggtggtatgaggcattgtgggtgggttggaacatgcgctttagtagaaagcatctggaagatcatcctgtgttttgctcaccctctctttgttcagatgactgtcctggccctgcggaactctagatttatgagcttttggagtcagctcttgaggagaatttttcatagtatcttgctgtcttttcatctttgcagatatgggggaatgaactactgagataatctgaggggcctgaccaagccttgtcagctggtaagactggcatgtgcacagggaatcagctccctgatagaggagtccagacatgcaggggatcctgggtgtccactctgctcactgaggcagcagaaggaattgggagcttctggacccactatggcagtcagaggttcttaaggaaaaaaacaaaaattctcaatgcaggcaggcctaatcctgcgtcctgctacctctatcctcctgccttctccccatcctcatttctatgctactgcttctctgtactcctctccaagcccgggatctatatgttttgtggtgggagttctaatacccctggatcctctgtcttcactgacacagacaagtggtcagtcctatgaaaacatttactgtgaaatccagagagggcaggactgtgagggtgctatgcccttcacaaagtgtggtaggtactcagtacatctcttactagtaaaatcttgctgggataacccttggtatctgcagttgagtttgggcatctattatgaaagcagttcatatgcccccatcttatttcttgtacatacaagggtgtttgcataccattatttttcaaaagatttcatgatcttcttagcatgtttacaaatctgggaaatgcatttttgctgttcccacattcaatggctcatcattccaaagaggttggagaaaactttgggtgcttaggcctagtttgaaagttagagatgcctactactgagccagaatgaaccttcacaacgcaggacaaagcaggaccttactgaattgtagaaatggaagaaccctagagactctgagataatggatggaggaccactagttgacatcctttcaagatctacctttgtaatttatgaagcagtaagaaagggcattatttttgcttctgtgatcagagtttagctcatacccctatagtccctgtaatgctcctgtaatgcttgaagggtcataaaaggaagacagggaaaatggggctggagatagcagggtagagataaggcagagcaaaaatatgcttgagctcttggaattcaagcatataattccgaaaatatttaataaaaaatcaagttcaccttcattgtttctattattgttgttattttatagtcagtacttgtttaggttcagcccacgtgctagttgccttgcatgccgttccttcttaatctgactcccgccctccttttaccactacttgtggtgtaaatctgttaacggtaaaccttctcagtcttagtctgagaaagtctttattttgccctccttcttagaattatattagacgggtatagaattcaatactgactgttactttcactcagcactttgacgatattattcagtgtcttttgacttccatggttacttttgagatgtgtggtatctgcttaattactattcctctgttttatgttcccactcctgttgcttttctttcttctttccttccttccttccttcctcactcgctctctttctttcaaaagagttttgctctgtcgcttaggctggagtgatcttggctcactgtaacctctgcctcctgggttcatgcaattcttgtgcttcagcttcccaagtagctgggattacaggcacatgccaccacacctgggtaatttttttgtattttggtagagatggggcttcaccacgttgcctggagtggtcttgaactcctgaactcaggcagtcagcctgcctcggcctcccaaagtgctggaagcactttgagagccactgtgcctggccccctgttgattttaagaatttcttttgtctttgatataccagtttaagtgggagtttagtcttaccctattcaggacatggctcttggatgggaggattcctatggttcaccagttctggaatcctctcagccaccatctcttctgatatgggccttcttccatcctctccatgtcttctggaactcctcctacacatacctggggctttcttactgctttctccatatcttttcactgttctttctatgtctttatcttttgatgatgatttttgaggattttcttcagatctgtcatctagttcatgatttttttcttcaagttatttaatccttccactgaggttttagtttaagtcaccacctttttcacttagaggtgaaatgtttttcaaattatcttcttcctttattaggatgtcttgctctgagctccggttttcaatttcttcttttatgtctttaatatttcctaacatacttattttgcagcttggcttatagtagacatgcagatatttgttggatgaataagcacattattagttttgttctgacagttctcaaatttgaagttctcaggagtctaagcctgctttttgttatgcctgttggctctctctttcagtggaatatttccttgtgtgtattttgtaattttgtatcacgagtttatctttatcaggggattctctgaagcctgggctgaaggtatatccctcccgcaagattttctttttttttaagaaaaaatctagtttactagcggtgtcaccggttgagagtttctaaccccatagaccacataaatagcaaattggagtgaggcacagacccagctcacacatgacttcataggagacatttttcttctttccatgctcaggcaagaacagtctccctgttgtcttcctatgctagtagaaagatatttttctggcctatctttttagtaagggtatagccctttgtgggccctggctgtatatagttttggttctaactcctcaccattcataaacagaaaccctcatctttgggccctgggtgtgcattaaaacccatatcactattttgccaagattggggcctcccactcccccaccagagcagctgcagaactagctcgcgtgcttctggttttcagttcctttttcacttaaggcctgtagggatttcccttcctatcttgcaagctcaactaaaaagagtttttaatatttcttatctagctgttttatagaggaagcatttaggatactgtagttcacagattgttggaaatagaagtcttcctccttggtttcttacccaaagcagtgccatcccttctttgcctgtgaagatcattttatggtaggaagtgatgggggtatgctgatggtatcttgatcctgccaaggtggtccatagactgttaaaatgtagaggaccattgacctagaaagacttcagattagtactgaataatctatgtgttctttgaagttggaaatactcttttgggacaagatgtttactactatttgttagaaactttatagcgaatgtcctcctaaaataataatgacagaacacacaagactgaaaaaacatcaagggcttaatcaacacaaaatatttgcctaatcatggattccagatttgtaacagcccaaatgcttggcattctgtttttttccagactgtttctagggtctgacatgatcaccagtcccactcccaccaaagagcagcccaagtccactgccagcgggagctctggtgaaagcatggactctgtcagcgtgtcatcctgcgagtcgaaccactcagaggctgaggagggctccattactcccatggacacccctgatgagcctcaaaaaaaggtatatactcaacccttctcataattcctaatgcaggcacctacatgctctttgccacaccacagcaaggaatgtctgtttttaagtggatcactctatagtattttgaaagtcatgttttgaacaggcatcaaaagaagagttcaatttggggacatactactaatagaaacaggtgtaaaagcactaagcagtttcgtttattcatttggcctttgaaatattgttctatacccacctcttaaggcactggagttatttaggggaagtaggacttcttagaaagagcaaaaagtcagagatggagatgtgtcaggttcttggtgccatgttttgtcttagccaagcatttatcacaataatgttgcattgcatgccactccaaaagtcagtgacttaaaacaaccactatttatctctcttatgtatctgctggttggctgatctaggttgggcttgacactaggccacagatttggtccaggtctgttccacttgcctctcattattgttggagtaacgggctacccagggcatgcccttagcatgctaagacggacaagcaagagggcaagcccactcgcaagcatatgtcaagcctttacttgagtcgtatcaaccaacattctattggctaaagtaatcatgtggccacattccacataagtaaatgaagcagagaaataggctccagttttagtgggaggaactctgaaatcacagtgcaaagggcacagctgcaggggaagatgagggattggtaacaaggatacattctcccatgttggaaaaaaggaaactgatgagaggtgataaaagaatttccgtcgagtttctattttctgtgactgcataaataaaaatttaaaaaccaaaatatcttaatcttaagatcttaattaagaccagtcttcttttttttttttttttttttttttttttgagatgaagtctcactactctgttgcccaggctggaatgcagtggtacgatcttggctcactacaacctctgtcttctgggttcaggggattctcctgcctcagcctcccgagtagctgggattacaggcatgtgccaccatgcccgcataatttttgtatttttagtagagatggagtttcaccatgttggccaggttggtctcacacccctgacctcaggtgatccacccacttcggcctcccaaagtgctgggatgagccaccgcaccccaccaatatcagtgttaatcttctgtacacatctgcttcaatctgttggttgaagggtttggatcagaaagtcaactatgacataactagaatttgcaccatttggggaaggtttctggctaaccaagcttactcaatagtgacttctggctccttagcttatggttaggtcagtaaggtagaatgttggcaatggtttcatcccttggtttatatctgctgctcttcaaggggacatgtgtgttgcttcacatggtgttaaaacaacagtggtaatcctggaaccctcaagtgactttgtcataatgtagccaatccaggaaaagcatcatattcaggattcatcaaactgagatgactaatttgctgctctagttggatttcttagctttctgctttgaaatccaggggatacaatcattcatgctctaaatattgaaagaaagccttcgtggacacctacggactggccatgctctcaaaaggcatttttcctcaacccgggatgtagtcattcttcgtgacttgacatacaaattagctttgtcaaaatctggaatgcagtctcatcattcactttttcacagcctctgaggttttataggctccatttctgatggtagacattgtaggaaagtaataactgaggtattgcccacattattgtgggatttctccctgtctctccaggaaggagatggaatcacagtcacaccttgtggcatagtggaaatgtacattggtccaaatggtaccttttaaaactatgcagaagcccagtgtgctttctcctgcacatcccttgcttcatcttttttgtctcatccctcatcagactggctttttaaattcttgcagaagtcatggctctttattctttggatgaacctttctcagagtcatacatttcttaaacatcagtgattcacttggatgcaagtagctcctggactgcacaatccctgcatattagctagaaaggctcgtgattctcctgcttggcacatagctggactgagctgacctccacacttccttcctgacctgagagcctgtgacagccgccttctccaaaagtcctccagactgtcattcttccttttccacaggctgcactgtgaggttgctcttaagggtgaagtgtaatttatttgcattcctttcttcattccccgatcatgatttctaaatattgatttttgcacttgctcctcacttcttaaattctcaataggaatttgggggctcatcaggcagtctgtttagagctgctataacccaggcatattctaggctttatcttaactataaatgtcactagaatcatagaaaaatctaacaaaggaaatagagtttggatagaggaacatgaaggcgaaaaaattgaatgaataattggaaaatgcacccccttaactaatatatctgcaaagaaacttatgctattaacttatctatcatcagttagtcctcaaattgagccactaagttgattcatttgggaacataaggaagaaaaaaacccaaaaaccaaaacaaaaactaaaccatattatgatagagccacaatcagacccctacccatgagaattgtcacatcagctggctggctgtaaactaactgtgcaatagaactgaatgtataattatgccacaggaggaaatctacaggaaataagataatagactccattttaatcagaagcctgataaccagaaagctcaacttctatactgtttccatggaaaggcagataaatatgaaagaaatgttatttattttataaatgacttccagaatattttataggattaacatggtataatttagcttaagtcattccgggaaattctttataattttctacaataataatgggtattttaaatggttcaatttaatgatttttaaaagtacctcttccaataacttctttctttggttattggtattgcatggatgagaaatgtgtagttaatcagaaaagcatattaactgtagtactccatttcttaattgtccttgatacacatcatgaaaatgtatacagttggctctactagcaaatgtggaaagtggtgaagctgcttaaaggctgtatttcccttgagcaagtcacttttatattctgaatcttattctcctcgtctttataatgctctgcattttgttcacaagacagttgtggaattaaaatgggataagataatatgaaagttcatgataagcctcacagtactaaacataccgaggtagcagcatactatgttgattcatcttattgtcatcagccacaggctgagccttggccatgtgcttgctctgggaactcgacagtgggaatcagggagcttgggttcctgttctaggggtgctgtcaactagctgtgtggacctggagccccagttttctccctgggtctcaggttcctcagcagaacaggtatgggactagttgatgtccaaggcctttctagcactaatattcaatgcagagccgtataatctggggtacttctcttagaaacttctaaaaatacagaactttctctctcactacgaaatctgactgcagtaggactgaatcaactgcgttggcaaggctttcctccagccccgtaagcttctgacttctttgggaacccatattgcctccagtttctggtgtctgctgccacctgctggttaacttctataagaacagctaaaacctagggaaatagaactgctttgcctcacgtgcttatagagtgattaggtcacactgagtcaccgataggcatctaccactgatggggactcagagtacttacaccagggatgagacacatgtgtgctgtgggctgttgtggaggaaataactgcagtctatcagtcttgatatctacctctgctttgaaaattgcaaagctgttggccagcgttctaatctgttttcttctggggtgtgtttactcttccagctctctgagtcctcctcatcctgttcttctatccattccatggacacaaattcctcagggatgtcttccttaatcaaccccctctcctcccctccgtcctgcaacaacaaccccaaaatccacaagcgctctgtctcggtgacgtccattacctcgactgtgctgcctcctgtttacaaccaacagaatgaagacacctgcataatccgcatcagtgtggaagacaataacggcaacatgtacaagagcatcatggtgaggagcaagccctgacccaggagcgggtttccatttagattgtgtgtctgtgtctgtcggccgctcagactaatagccctaaatatgcacactcaatattagcatatacatatatgcattcacacagaagggatgtgtgtcagttccaggtctccctgggcatagatgctgaatgatatatgtatataaaatatatatacatatatatgcacacacatggtgtatataggatataattttcacatcttaaagaaatgctaaaacttattcgtttaggtcagtattagccatttgaaaattctcaatttgggtgacagtgtaaatgtgctccagggaggatgacacaacctcacacatttttggaagccttcctatggaattatatgtctggttttatcattgaatttccacacattcttagcagtgtactcccctgatggcagatttttgtcatttagtcatttggatcaaacctagttaataaagtggatgatcaagctagaaatacagtttgggttaatgaggaacgatgcctataaaatgagactgacctttttgagcttcttgtaaaatctgtgtgtttctgaggacaattgcaaagatatttttaataatggcagtcttttgggaatacacacagagcctctcatggcgataaccttgggtatgtgaggtctggtaggtttatcacaagaatataaactccttagtttatgggagataatcatgtattggaaatcactttatcctttgcagcaaaatcccacagctaattccacatctctcctcatctttatcactcgcctctttgaaggcacactcagtgcttacaagctcaggtctgaatatggcataagtggtatggaggctccacataaaagctttgctaaagcatttattgagtcaacaaaatatcaaacatttattgcgttctagtcattagatcaggctttggggatagggagatgagtgagacatttctgcctttgaggaacttttaattagaaagggagcccacaaagcattattcacaatgtgcaaaataatagagccaagatcaggtggtaaagggccttgtggcccacacagaggagtgtgttaatcccgcaggcaatagggtcttgttgaaggcttttaagtagtgatgggatttgctcattaagaaagtcatggcactgtgtttgctggagtgtcggggtagactggaggcggggaagcaagttaggaagctgctatcatgttccatgtaggagaggataagggcttgaatgacggtcatgtggctggagatggtgaggatttttgaaagcttttgatgaggtagaattgtagaatccattcatttagttaccaactttttggttactgttgtggaggactagaggctgtctgggtagttggtgggtctgtgagatatgaactaccagaggaggatattcagggacatttaaatcagaggtaccagtatgacatcagatggcattgtctgatagatggtcagaaacatgggctggtgcaaggctggtgctgagatcaaatactgggagttgtcaaaccccacaggggggacgtggtctcgcgagactgagtgtaggatgaggcagaatgcaagtggtaatgagggaggggctaataaaggagcacccgagaggtagaggaaacacagggaagccaaggtcctccatgtggttactgcctgctcagcatggtctgttcacctggcacctcttacctgcaccaatcagagagaatgtccactgcataactctacagtgtctctgaattatagcatggatttgtacaccaaacagttatgttttgggacatgcctggtcagcgtgcactctgctcagtctggggggaactgtgagtggttggactgcacaaacctctactgcccaggaggagtcacaggttgtgcatgctgtctgagtgttgggagggtagtgagcagaagatcccctgccccctgctctgagattcctccttccccagcaaatgggctgcctctgtgagaatcacctctcctgccaaccccttcctgtggccctttatattgcaccaggtggtggcactcacctttcatgaaaatcctgccagcgcatgtcacaggcttattctggagagacgacacactgctctcgtgctctcattctaatcgttaggcctctcaggagaaaccttgctcacaggacgtacctttctgaaatgtattatgctgtgtgctgttgaccagaagatggaaataaatcagtccaggttcaggcgagactagcagttctcaaactttttgttctcaggacccctttatactctgaaacagcattgaatattccaaagagctccagactatgtgggttgtatctgttgatatttaccacattagatatttaaactgagaaactttcaaaatgttgattaattcatttaaaataacaataatgaacacattgcatgttaatgtaaattttattttttaatgaaaaatatctatttttttccaaaaattattgagtgagaagtgtggcattgttttccatttctgaaagtctgttaaaatgtgagtgagactggctttgttttgttttgtttttgtttttactgtgagtacagggtactgaagaatacagtgacagctagtagatttgtagttagaaaccactggaccgatttgtgctgttgtgccagcaattccatccaccatagcttctgcaatacctatgcaaatgtcaacacaaagaaaagacaaacagcatcttagtattatcatgaaaataattttgatctcatggatcccctcacagatttcagggaccccacgggccatagattgcacactgagaactggtggcctagagaacttgctttgcaagagcaactaatgtccctggaatccaaggcccttccatagaagaagagacagcaattagcccttgtaaaattacctcctcagtgaccatggaaaaatgtcttctaccactgaacccatcactctttcgaaatgatctttctctccattgtgtcaatcacagagtcagtctcccaagatcccttacacagggaatgcagtatttctgtcacaggaaagtcaatgagggcgacaccaaagcatcgttcagtaccgcgcattcagtacagcagccactggccacgggtggcgatggagcatttgaaatgggaatactccaaattgagatgagctgagggtaaaatatataccagattttgaacacttagtacaaaaaagtaaaatactgcattaacaatttttgtattgattatatatgctgatgtaatatttggggtgttcaagttaaatatcacctttcaaaaactttttttttttttgaggcagagtcttgcactgttgcctgggctggattgcaatggcacgatctcagctcactgcaacctctgcctccctggttcaagcggttctcctgcctcagcctcctgagtagctgggattacaggcacccacgaccacgcctggctaacttttttgtatttttattagagacggggtttcaccatgttggccaggatggtctcaagctcctgacctcctgatccacctgcctcggcctcccaaagttggtgggattacaggcatgagccacctcacccgtcctaaaaactttttaattgtggctactagaaacttaaaatgaaatatgtggctcacattcgatacctatgagtgctaattcagtctatcagcataaggatgcacgcttgagctgtgaatactcattgtaatcataagtttgattcagcatcgctttgatggtacaaagtaataaacacgcaagggaaagcccttggtcatcttgtcttcattgggacatacctggggaagtttaaggaaaggagaatgaaggtagcctggctgtctcatatgacttacccaccttagcctgacatgcatcccctgaagggaggtcttctcctttagctttctgctactagtccagtgtgacccagctttgggagtattttcttcatactatcaaaaacatattttcctcatttagaattttgtgtgcacctacttttcccttgtaaatgaatatgccagatgttttggtaacagacacgtgaacaagatctttgctgcttacaaggacccctttgtaatgcacattgtttatggaatcacaaacaccagctgctgccccagatcagagtgaggcatcttggcactgccatcctcaggcacacaatggcagtttctgggaggaaatgagacttctgtatgtgtcgaggggggtcgtggggggctttctttctatagtcctcttgccccctggtgagaacagcttttatttttaagtaagaataatctgagttttcattcacttctttcaaacttaaagaaatcacccaaggtatggtacataatttagctttcttttcaggttgctctgcacaccctgcaaatagttggctggcaggcagtgaggtgaagggaagaacatcagaattggggacgagggaaacctttaacttgtgcttttaaaacacttacaagctgatgtttattgaagcataatttgcatgtagttacatatgcagatcttaaatgtttgattctttgagttttaataactatatatatctatgaaactactaccccaaatctagataaagaacatttccatcctgcctgccagattccctgtgccctttccaatcaatcccctcctaacctagaggttcattttctaatgccacagattttgtttttcctttttttgaaagaatagactccactggtatgtaatcttttgtgtccggtttcttttgcctaagatgatgtttgtgagattcacctgcattgttgcatgtgccagttcttagttcccttcagttgctcagtaggattctattatgaatatactacgatttattctcttttcctgttgatggagattcagattgattcagtttttagctattgtgaataaatctgctatgaatgtttgtgtacaagtccttttgtggacgtatgtttttattccgcttggtaaatgcctaggagtgggactgctgaatcacagggtcacctgtactttttgaaatggtcaatgggcagaactgcgaccatttttatcccgtgggttgtaaccagtgccatagaagcagttcaacatgggaggataattttgggccaggactaataatgctttgcatttttcacaattccctcatatatattctttcacgggaacttcaaccactgtggaggagataggcaaggaaagcgttctctccattttaatagcggatgacgctgtgactcagagattaggtgactcgcccatcatctgtggctgctaagggtagaaccaggactagaaaccagggatcctggctcttggtccagttccaattccacgagtccgttctttctggaaaggcatcacaacacaagacagcaagaatgagagggtcaggagaactccctcaggaaacgtgaagctaagtactttacaaacctgttcattgtctttgcagttgacgagccaggataaaacccccgctgtgatccagagagccatgctgaagcacaatctggactcagaccccgccgaggagtacgagctggtgcaggtcatctcggaggacaaaggtgggcatccttccgagacaggcatgttccttcccagggcaggtggctagcacatgtccacagtgctccgcgtttagaaggcagaaaacggatacgtattgttttattgggacctagtggtggtttttgatagtgcaagggtgaacaaccgtgccatcacctcacttgtggaattaagtatctcaaaccgctctccgattccccagctcttgtttttcctgcgattttgatgagtatttcttctgcccagtctttctgagctcttcaaacacttttctaggaagaagtgtctccctgtgccaggaggcagagggtaggggagtctgttgggcattgcaggtggccacacacctcctttacccaagaatgtgtttctaagttgtgtgtgaatctgaaatttagtggttcctgtaataatttctcatcatttcaattaatcatgtatgaaaggtattttctttattcatgatcaattttaaaataacacaaacctctaacttgaaggttatttacctcacatttattgaggcaaagaactggtaatctatgaaaggcttcaatatgcctgggaacatattatttaaagaaatctcttttatgaaatactttttgggggaaataatcacccttgcatgtatctgtctgctaatatgaatttggggattgtatttgttgagagaaggaaacaggctggtagaaaactcctctgtaccttgtcacttcacagacagtgactgtcaggataggtctcttctccaagtgcagaaggagcagcaaatattgttgaccgaagccaaccctttctgccgccagaccccaaactgtccattgcagccaccttaagtagtcctctgctcaccaacaagcagtgtcccctataagtgagaagcattccacaagctaggctatgggatcagcatgtcacccagggctctattgctggtttagaggagagtggctgaaattagaatactaccttctcctagagattaaaagctacagcctctgggaaaattctttttcagtttcctcttggaagatttctcattcattcagctgagccttaggctgtggggcaacactttctcagttataaccttttgatgtaattataattataattctaagcctaaaagatggtctcaagttgtaccattttgcttacaacacagcactaaggtgaggctggtgggtctaaaggtccaggagtctcgaggggtagccaggacccagtgttgcccaccagctgtgtggtcctaaatgcaagctgctggacccccgggccttggtccttaattagagacaataccctgctggttcctcatatatcacagggcgattctgaagataacaagaaatcgtgtacctgaacatggggagacactaagtgatatataactgtgaggactattattactgacctgtgagtatgtgggcagcagcatgggacactttgaggggattgttctccgctgagcctttgtgcacagaatgtacaggagtcacttggaacctgctcatatcagtcttgttgttggatatcaatgtttgaagttaacttaagactcaatttgtccagttttacaaccatatgcctctctggttgcctccccgaccccactaccacagagctagacttgcacattttaccttttttaattctgtttgttttttcaaatactcattacacttgagtgctaaatactgtataccttcttgtggcgattactcaaggatctagaaccagaaatgccatttgacccagcaatcccattactgggtgtatacccaaaggattataaatcattctgctataaagacacatgcacacatatgtttattgcagcactattcacaatagcaaaacctggaaccaacgcaaatgcccatcaatgatagactggataaagaaaatgtggcacatatacaccatggaatactatgcagtgataaaaaaggatgagttcatgtcctttgcagggacatggatgaagctggaaaccatcattctcagcaaactaacacaggaacaaaaaaccaaacactgcatgttctcactcataagtgggagttgaacaatgagaacatgagaacacatggacacagggaggggaatatcacacaccggggcctgttggggggtggaagactaggggaaggatagcattaggagaaatacctaatgtagatggcgggttgatgggtgcagcaagccaccgtggcacatatatacctgtgtaacaaacctgcacgttctgcacatgtaccccagaccttaaagtatagtaaaaataaaataaaaattaaaaaacaaaaataaaagtgaggctgggcatggtggctcacgcctgtaatcccagcactttgagaggccgaggcaggtagatcatctgacgtcaggagttcaagaccagcctggccaacctggtgaaacccgcctctactaaaaatacaaaaaaatacaaaaaaaaaaaaaaaaattagccgggggtggtggcacacgcctgtaatcccagctacttggggggctgagacaggagaatcacttgaccctgggaggcagaggttgcagtgagctgacattgtgccactgcactgcagcctgggcaacaagagcaaaactccatctcaaaaaatataataataataaataaataacttaaataaataaaataaaactgagtcaaaataactttgctttgatgatttcatattacacttggaacaatccttgttcaaaaattacagatgtctagttgggaatcattgaaattgaaaatagtttaaatattaaaagaaggggatatttgctgcaatatttgctgctccttctgcacttggagaagagacctatcctgacagtcactgtctgtgaagtgacaaggtacagaggagttttctaccagcctgtttccttctctcaacaaatacaatacccaaattcatattagcagacagatacccaggaaggggagcatcacacactggggcctgtcagggggttggggaaaaggggagggagagcattaggacaaatatctaatgcatgcaggacttaaaacctagatgacagattgataggtgcagcacatgtatacctatgtaacaaacctgaacattctgcacatgtatcccagaacttaaagtaaaatactataaaataaagatatgcacgttcagcacatgtatcccaaaacttaaagtaaaatttttttaaaaaaatatacatactttcctacatgggaaataaaatactcgtttgacgggattacttcaaaaaatatttcaatatttcaagtagaattctggagtgctgtagattttctgttttttctatgtcattggattctcttagtctttgagaaaatctgcatactggggtggaaaatggactgcaggagaaacgaaacccgagttcaaatcccagttctgctattcactagctgccatcttgggaattttctttaacttttcttggcctctgtttcctactgtactttttttctagttttaacattttctattggaacatttaattcatggagcgaatttctaaaatctcatttgtactaattttttaaattgggattgagaagctggggccaatttttggggtagtgatggtgatcactgtctggttcaggtcacattccagagatgaagggccgtagtcccgttcttgtgtctgggcaaggtttacagctgccgttgtcagtactgagctgacctccacaagctgaccatcttatctttccttatctttttcagaacttgtgattccagactcagcaaatgtcttttatgccatgaacagccaagtgaactttgacttcattttgcgcaaaaagaactccatggaagaacaagtgaaactgcgtagccggaccagcttgacgttgcccaggacagctaaacggggctgctggagtaacagacacagcaaaatcaccctctgaagggagggaccagtggccccttgtttgccaaaggcagagtggggctgagaaacaggctgcggtgattgcaattaccatccggtgttcgaggatcattggtgaagtcagcagatatttattgagttcctgtggtgtgcaaagcattatgataggcaccgtggggaaactggaaatgaatttgacatgaaaaggatgaacgattcactgattctctttgactcatttgagactaaaatgcagaattaccaacatttaaaacatatatatgcacatgtatttggtatgcatgtgtatctatataaaaatatataagagggactttatgggatagtatggactatggaaaaacaaatttgcacaatggcctgggaagttgaggtcactttttacagggaaatagaagaaactgagaacctagtctcgtatattctgagtaaatggaatcagtcctgggaatagagagtgtcctttgtgccagtattacaagaagcccaaactttatttttataaagggagaggatgactttctcaatcaagtgccaccagataaaaacaactgcagaggctggaactgccacaggctgtatgaaaggccactttggaaagggtttggatgagctggtggccttcaacctctgcctgcatctgccactttctgctaccctagggaggccaggaggagcttcggaggaccatcgccccactggtctagccatcatgacacctctggaggtgtcaagctcctgaaacaagctcatttcagtttctggcaaccccgtgtatttccgttttccccctaaagaacatatcataatcattgcacaaataaccatgttctttggtaatgaagccagaaaagaaagcgcaaaagaatggtgactcatttggactcttatctgtcttggaatgtcactgcttcattgccttctctgattgccttttgcatgtaaaactatgtgtctggagtcttttgccatctggatcttagtacctctttattatgtgcaatttattcctcaggtgtggaaatttctactgcaattgactacgtttgattattttgagcttgtgaaagatttctgaacagtgattgtcccgttaatagcccctcagaagatgttccctgctgataacagcatcctattttacttacttttatagcattactgtgcctagtcgtggggaaagagatggggctgtatagattatctgaatcatttgtctaagaggtacattcttccagatggaatcaataacttttttttttccaggttcccgtgcttgctatcacagtatcattgttaagtgacacttttgtctctcataacaccatcacactcttccttccaagtctgagctgtgctggggtttgaactaaaagccatatgtggaatattgacatgtgtaagaagcactttcagaatgttgtcctttttaagaaatgattctcaaaataccagtttttattccaaaaatttagagaacaaacccggaatatgaagtgcagattgtaacatggagctatttttttttcttaatcccataatacagctcctaaaagttgtgtgggatttgcgttgcataaatagccatgtgaattccacaagaagcaccagggaaagtttagagatttgcggcaatggaccgaagaacgggccaggaagtcctccaatttcctttggtctttccaggagattggactacacattgtaaagactgactgggtttcaactagtcaaaaagcactttcttctgttttcaatccctgttcgatttgtgcttctgtgcttgtaggagagatggccagggtggcagccctcatgcaggttgaagtatatgtagcctcagcctgatattcttggtgcgaaggtaaaaaaaaaaaaataaataaaaccattggcctggttgagggcgtgaccaccaagacatatatgttgtgcccgtgttcatcctgtgtatttatactgtatatgtagagtctagatttatatactgcaatgtaaaatatatatatatttaccttttttaaagacaatggaaattccaagtagctaaaacttagcttcatttatttaatgccactttaaatgtcttaaatttgtttcctggtggacagccgggtaatgcttttagctgctcgcatgcttgtctttctgcatctccatcatctgtttaccttttggttaaactaataaactagtttgggacttggctggcatgtgctgccagacccaaagggattgtatctggattattaaccaggtgggttttgggttccagtgtgtcagtaagcttttgggaagcccgctgaattggttggaggagcacagggaaagccagtggcagagttaggtgggatcctccccactggcaagtgtcacaagcctttgggggaaagaatgacttccttaggagactgcagtcagagatgatgccgttgctagattgctgttcttagggatggagtctcactctgtcgcccagactggagtgcagtggtgcgatctcagctcactgcaatctccgctgcaccagttcaagcaattctgcctcagtctcctgagtagctggtattacgggcgtgagccaccacacccagctgatttttgtatttttagtagaggtggggtttcaccatgttggtcatgctggtcttgagctcctgacctcagatgatctgcccacctcagcgtcccaaagtgctgggattacaggcatgaaccaccgcacccggcatggggacacttaataatccaacttagagtgagggtccaagttagcattttgtcacctttctgagagcctttccccgcattttgtgatggataccacctgcataattcttgaaaccgcccatggtgccttggaagccagggggacctccatggagggaggaaaggcattcccgaaagaattacacttgaaatccttttaaactgatccatgcagtttccccaaaggcattacgtctgaggccagcttcactggacagatgcacagtattgtcatttatcatactgttaaaaagttcccaggattattttctagtagatttctaaatggatccaaattatcaaatgttctgtgcccttgtggaatttttagaggaagccaagtagaaattttaataataggaaattgataatatggggtagggcagaaaaaaaagggaattttgtctttggtacttgttttttcaagatcattctaaaagcctgtttcccttgttttgcctttttctagaaactgggcctggggacagtctgcctgaaggaataatgtcttaaacttgtcttctttggaacgtttgtaaattctccctgcagcgcaggatcattaggaggcatacaatactgctttacgtgtcctgatttcagggggactgaggaggttcctgactcaaacctctttttcttcagatgcctacatttccactaggcaaagttatttccattgcattttgcattgcttttccccctagacatctctcttaaaattaaatacctttggaagggatgtgttaggctaggctaggctggaccgaagtaacaaaccaagaaatttcaacagcttaagaccgaggtttattttttctttcacgggacagtgtaatgcaagccaggaaactccttagtagcttttctctaacagcagctcacagatccaggcagcttccatcttgcaacttcgccatctcggtgtttcccttccagtcacagtgatgataaagagagtaaaga

SEQ ID NO: 513 - DNA, 39245 bp, Homo sapiens
  source 1..39245: mol_type = genomic DNA
ggccctgaaagcggcaccgggcgcgacctcgagaggcgtggctgggccgtagtcagtggagctttgggggctgggccgtaggggctggcctcaccctctgtacgctccctgcgccgttgccggccgagacgtccacctcgtagcggatgtgagacgtcatgggtgtctcaggcggcgggagccagcgcaacactacgtggccgctctcgtcagccaaccgcgccaccagccccacgggggcgtctaggagcactgcaggcatgggggttggtcaggtgggcgaggactgagaccctctcctccgaccactcctccattcccagagcacttacctacttcattgatgtggatgacacggtgatatcgcggagcgccggaggctgctgtgacgcgcaactctaggggcacgaagctcgacgtgtcggctgtaggcagcgaacaccagaagcgcaccgcaccacgagccgtgggagcctggtgcaggcgacacagcttccatggctcatccctatgcgcccagggaagggagcaggttgggaggggggaccggggagttggcattgcccggcctgtggggggcagtgtgtatgtgtgacacaaggtctagccttgtgtgtgtgtgtgacaaggtgttccttcgtcgcccaggctggagtgcagtggcgcgatcatggctcactgcagcctcaaattctggggcttaagggatcctcccacctcagcttcccaagtagttgagaccacaggcacgcgccacgcctggctttttttttttttttttttgagacggagtttcgctcttgttgcccaggctggagtgcaatggcgctacctcggctcaccgcaacctccgcctcccgggttcaagcgattctcctgcctcagcctcccgagtagctgggatcacaggcatgcgccaccacgcccggctaattttgtatttttagtagagatagagtttctccatgttggccaggctggtctcaaactcccgacctcaggtgatccgcccgcctcagcctcccaaagtgctgggattacaggcgtgagccaccgcgcccagtctaatttttttttaagagacggggatctcgctgtgttgcccaggctggtcttgaactcctgggctcaagcggttcttccgcctcgaccttccaaagagttgggattacaggcatgagccactgctggcctccttttggatactacctcgagaaggcgtcccagccccgacgtagtaacgccttaccctcgatttggaggcgttgttatcccagcctgatgtttggggtcgcgttccagcggtgatcgcgggagtgttcgcgccccggcccatagagggcgtgccagccctggacccgcaggtttccctccagtgaccacgactggaggcgccgtcgggcctcaaacagcaggggacatacgaggctacgacctccagggagctctgccccaccccctccctccgcccttggaggcacccgccggatcggactcactcgagctggtaggagaagctgtagttgcccgggcccaccccagcgctcgccgcttcctcccagaaacacaccaagtcctccaaccgctcggtgaagcacagaagctcttcgggcccccgggccgccagcaaggccgctggggaggggcgacaaaggaagggcatgggggtctgagctctatcctcgggagacagccccctcctcttccctcccgcagcctgggcggacccgataagaaaaaagccccgccctgccatcttcccaagcgggtcccttggaggggtccgcagaggtggtgcccccctaattcccaggggcaagtttctcgccttactgtcccccgccgtcaccactggcgcacacctgcccacccagcggccagctgagctgggcgcggcgttcaagacctcgagctcgggactgccagccccgccccagcctaggacacgcgcgcggctgggggtgtgtgcggagaggcgggccccctatcggccccggcaggctccccgccaaccgatagcgccaaccgtgccccccgcctccctccctccaccgggccgggcaagtgatctggcgccctcacacaaaccgtgtttacagtagcctgtggcttggcccctctaactcggacccgggctttaccctccctcccctagggagggtcggcttggtccccaccccccagggaccttagcaccaagtcagcccccttaggatttagcatgtcccagactccctgaaaaggtaaaacgggaatgttaagcccactctagctcttgcccgggacgcgatcaggagtcttggatcctaacataccccaccccgccccccacccatccaggacccagtctaagggttcagatgccagcttggcccccaggacccggtcaggaagtccagaaacaggcatggcccccaggacctaggctgggagttcaggccccagcatggtcctgcaggctccagcgtaggggtccacacgcagctcatccttacctttgctctcgaacttggggtccgggaggttaggcgggggcgcccaggcggccccagcgagcaggagacaaagggagccgacctggggccagagggacgccccgaggtggtccatgatacagcccccgccacggggagcccagggctcctgcccctccgtcccccgcccccggcacagtccacagctgggtcagcagctgcctccgccggacgcagctgaccaggcccttcccgaccaggcgcctctaagtggcagatccccgagggggcggggccagcactcagcctgggtagagataagtgcctggcgggaggaggcaggggcccttcccgagcccagaggccgcttgggggcaggggagggagttgggccgcaacagctcccgttctggcttcagacacacgttttttttttctttgtggccctggacaggtgacttaccttacctgagcttcagacttctcatctgtaaaatctagcctggcacatagcgaacattccaaaaaatgtacctactgattttatcgcagaaatcagcatctcttcccagcctggaaataaataaaaattattttctctctctctctctctctctctctctctctctctcctttccttccttccttccttccttccttccttccttccttccttccttccttccctccttccctccttccccctctctctctctgtctcagggtgttgctctgtcacccaggctggagtgcagtggcacaatcatagctcactgcagcctctggactgaagcaatcttcccactgcacctggctaatttttaaaattctttgtagagatgggatcccactatgttgtccaggctggtcttgaaatcccggacttaagcaatcctccagcctccatctcccaatgtgctgggaataccagcacgagccactgaagccggccaataataatccttgcaacgaccagcagttgagtgtttgcacagtgctaggccatgctcctgggcagtatgcataatatgtgagattttcatttacgaatttttgggaaaaaaatttttaccacccacatttttattctcttgggctgggcccggtggctcacgcctataatcccagcactttgggaggccgacgtgggcaaatcacttgaggtcaggagtttgagaccagcctggccaacatggtgaaatcccatctctactaaaaatacaaaaattagccaggtgtggtggcgtgtgcctgtaatcccagctactcaggaggctgaggcatgagaactgcttcagtctgggagatgaagattgcagtgagccaagatcatgccactgcaactccagcctgggcaacagagtgagactgcatctcaaaaaataataataattggctgggcgcggtggctcatacctgtaatcccaacactttgggaggccgagacaggcggatcatgaggtcaggagttcgagaccagcctgggcaacatggcgaaaccacgtctctactaaaaatacaaaaattagccaggcgtaggccgggcgcggtggctcacgcctgtaatcccagcactttgggaggccgaggtgggcagatcacgaggtcaagagatcaagaccatcctggccaacatggtaaaaccccatctctaccaaaaatacaaaaattagatgggcgtggtgctgcatgcctgtaatcccagctacttgggaggctgcaggagaatcgcttgaacccaggagccggaggtttcagtgagccgatattgtgccactgcactccagcctggtgacagagcgggactccgtctcaaaaaatatatatatatattcgagcgtggtggtgggtgcctgtaatcccagctactcaggaggctgaggcaggagaattgcttgaaaccagaaggcagaggttgcagtgagctgagatcacaccattgcactccaggctgtgcaacaagattgaaactctgtttcaaaaaaataaataaatagtccatgcacagtggctcatgcctgtaatcccagcactttgggaggccgaggtgggtggatcacaaggtcaggagatcgagaccatcctggctaacacagtgaaaccctgtctttactaaaaatagaaaaaattagccgggcgtggtggcgggtgcctgtagtcccagctactcgggaggctgaggcaggagaatggtgtgaacccagtgggtggagcttgcagtgagccaagattgtgccactgcactccagcctgggcaacagagcgagactccgtctcaaaaaaataaataaataaaataaataaataaatataaataaatataaataaaataaaatggcaatactcctaccctgtttctattaagcaggtgggttttttgtttttgtttgtagccaatgtgcttattgtcacctgacatgtatttgatgttttgttattgattcgctgcccttactattccatgaaagcaggtttttttttttttttttagatggtgtcttgctctgttgcccatgttggagtgcaatggcacaatcttggctcactgcagccttcgcctcctggattcaagcgattctccttcctcagactccagggtagttgggactacaggtgtgtgccaccacacccagctaatttttgtagttttagttgaaacggggttttgctgtgttggccaggcttgtcttgagctcctgacctcaagtgatccccccgcctcagcctcccaaagtgctgggattactggcatgagtcactgagcccggccagggattgattgattgattgattgattgatttgtggagtcttgctcttgttgcccaggctgcagtacaatggcatgatcttggtttactgcaacctccgcctcctgggttcaagtgattctcctgcctctgcctcccgggtagctgggattacaggcacccgccaccatgcccggctatttttttgtatttttagtagagacggggtttcgccatgttggccaggctggtctcgaactcctgactttgtgacccgcccgccttggcctcccaaagtgctgggattacaggcatgagccaccgcgcccagcctcaggcagggatttttttttacccttttgttctttgctgtatccctagcatatagaacagggcctggagcacagtagaagctcaagaaatattttgtggagtaaaagattagagatgtagagaaaatcaagctgagagaggtagagaaacagctgatctcgtgttagccactgggtacaactgtgcctgcgtaaccctgcgcttttaaaaaacggaagtcaacgcaaatctcttcctcaggaaattgatatttagactgtgcatgtatgtgagagggaggtggaacaaacaagatggacacctgtttcaaaatttggtcacaataaattgttatgaatggcaaacgggccccagagttaaatgcatgttttctggagttggatcaatatttgaacagcacccacttaccatgggaccttgagtaagttacttaaccctcccttgcctgaagcctggctgacatggtgagaccttgtctctataaaacacgttttttttttgttgttgttttttgttttttgtttttttaagtaagccagatgaggtggcacccgtctgtggtcctagctactcgggaggctgaggtgggaggatcacttaagcccagaaggtggaggctgcagtgaaccatgttcatgccgctgcattccagcctgggtgacagagtgagatcccgtctctacaaaacattgtttgtttgtttgagagacggagtctttttctgtcgcctaagctggagtgcaatggcgccatctcggctcactgcaacctctgtttcccgggttcaagcgattcttctgcctcagcttcccgagtagctgggactacagatgtgtgccaccatgcccagctaatttttgtattttttttagtagagacggggtttcgctatatgttggccaggctggtctcgaactcctgacctcaggtgatgcgcctgccttggcctcccaaagtgttggagtgttgggattacaggtgtgagccaccacgcccagccaactttttttttttttttttttgagacggagtctcgctcagctgcccaggctagagtgcagtggtatgacctcagctcactggaaccaccgtctcccaggttcaagtgattctcccatctcagcatcctgagtagctgggattataggcacccgccatggctaatttttgtattttagtagagatagggtttcaccatgttggccaggctggtcttgaacttctgacctcaggtgatccacccgcctcagcctcccaaagtgccaggattacaggcgtgagccatcgcacccggccaactttgtttttaagttagccaggcgaggtggcatgcgtctgtggtctcagctactcagggggctgaagtgggacgattaattgagcccaggaggtggaggctacagtgaaccatgttcacaccacggcactccagcctgggtgacagagtgagaccccatctcaaaaaaaaaaaaaatagtggacgataagtgtctcttccggcccagacatggtggctcttgcctgtaattccagcactttggaaggccgaggcaggggaatcaattgaagatagtagtctgagaccagcctgggcaacataacaagaccctgactctacaaaaaagaagaaaaattagcctggtgtggtggtatgtgccggtagtcccagctactcaggaggttgagtaggatcacctgagtctaggagttcgaggctgccacgagctatgatcgcaccactgcactccagtctggttacagagcaagacactgtctctaaaaataaataaataagtaaataaataaataaaatgtataaagtgaaaataatgtctactccatagagctatggtaaggattaaattagattgtgtcaagttctttttctttttctttttttttgagatggagtttcgctcttgtcacccaggctggagtgcaatggcacaatctcggctcactgcaacctccgcctcccaggttcaagtgattctcctgcctcagcctcccgaatagctgggattacaggcatgtaccaccacactccgctaattttgtatttttagtagagacgggtttctccatgttgaggctggtctcgaactcctgacctcaggtgatccgcccgcctcggcctcccaaagtgttgggattacaggcgtgagccaccgcgcctggcccctgtgtcaagttcttaaaacagtatcttgacatacaataagcattcagtaagtatagcaatttgcttaaactagttcaagaaggatgctgaactaacatccaaatgatcttaagaggctggatgcggtggctcatgcctgtaatcccaacactttgggatttgggagacagaggaaaaaaatacccatttgggcaaaaaatatccaaattgtcttaaggtctttcttttctttttcttttcttttctttttttttttttttttgagacaaagtctttctttgtcacccaggctggcgtacagtggtgcaatctcggctcactgcaacctccgactcccgggttcaagcgattctgtcctgcctcagtctcctgagtagctgggattacaggcgtgcaccaccacgcctggctaatttttgtatttttagtagggatggggtttcaccatgttggtcaggctggtctcgaactcctgacctcatgatccacctgactcggcctcccaaagtgctggattacaggcataagccactgtgcctggctggtcttaaggtcttaatactcacagaagaccaaaatttaaaaaaagcctgtaaaggagcggcaaggcacagtggctcacacctgtaatcccagcattttgggaggccaaggcaggtggatcatcaggccaggagttcgagaccagcctgaccaaaatggtgaaaccccgtctctactaaaaatacaaaaattagccaggcgtggtgacacacgcctgttatcctacctactcaagaggctgagacaggagaatcgcttgaactggggaggcggaagttgcagtaagccaagttctcgccattgcactccagcctgggcgacaaagcaagactctgtctcaaaaaaaaaaaaaaaaaaaagcatgttgtgtgctagtaattggtctttcatcagaccttatatgatacttaaatttctgtatctctactcccaacccacataattcctgggcattcctcattattgctccagggataatgtttgaaaacctagtgattattttttgcccattcaccagaactcccccttctcctcataacagcccccacatttaatgtccacttatggactctcccaggctccacccctgtgattcaaagtttctgtgccagctcaaagggtgggcgcaggacccaggcctggctaatcagcacatctcattcccctgaacacagtgattggtttagaggtggacacatgacacaaattggcccaatgggcgcctgctctgggactttttgctggagctgatgggaaggaggggctctgcttgcatgggatgggggagctgttgggatataagcctatgcctccacaaggtatgagcctgccttggagtagagctatatatatatatatgtgtgtgtatttttttttttttttttttttttgtagagacggagtcttgctctgtctcccaggctggagtgcagtggagcgatctcggctcactgcaacctccgccttccaggttcaagcaattctctcgcctcagcctcccaagtagctgggattacaggtgcatgccaccacacccagctatgagtacagctatattaaataaaatattatttgggctactgtaacagcaactcaaataatagtggcttaagtaagataaaaatttatttctcttttatgtaacactccaagtatcaacagtccaatatggtagctccctggtctcataggcccaggctccttctagcttgttgctcagctattcagacagtgtgaaccacctaatccaaaatgatccactccacgtcttcattcccaccagcaggagggaggaaagggggaaaagaaggacacaccgcttccctttaagggcaggttctgaaatttgttcacatcctttccctttatatcttattggccaagacttagccagtggccagatatgaccacaccttgctgcagaggaggtgggaaatatggcttttactttgggaggccagctaaaaatcagtggttccattaccatagaagaaggtgattaaatttgaggggacaatggactatctcattctcagagcaaatcagagcaaagagacagcaagaaaaccctgatgacatcttatgagtgcctggatgcaactgtgcctgaagccctactcattggacatttcaactgcataagccacaaatgtccttttttgcacatgcctctttgaattgggtttttggtcgcttgcaacagaaagaactcgattagtgcaatgagatgtaaagaccatagctgatgttctctgctgagtaggagctcataagtgggcatattattgtggttgtgactatgtagcagttcgccctacagctcatttcatcctctctattgtactccaacgctgacagagagctcacgcctctcttttcatcctcacaatccttttctttttcttttttttttttttccagacagaattttgctcttgttgcccaggccggagtgcagtggagcgatctcgactcactgcaacctctgcctgcctggttcaggtgattatcctgcctcagcctaccgagtagctgggattacaagagcctgccaccatgcccggctaattttttgtatatttagtagagaaggggtttcaccatgttggccaggctggttttggaatcctggcctcaagcaatccacccgtcttgcccccccaaagtgctagagccactgtgcccagcatttttttttttttttttgagatacagtctcactttgtcacgcaggctggagtgcaatggcatgatctcggttcactgcaacctccaccttctggattcaagcaattctcctgcctcagcctcctgagtaactgggattacaggcacccaccaccatgcccagctaatttttatattttttagtagggacagggttttaccatgttggccaggctgaccttgaactcctgacctcaagtgatccgcccacctcagcctcccaaaatgatgggattacaggtgtgagcactgcgcctggcccttttttttgctttttgaaacaggatctcgctctgtcacccaggctggagtgcagtaatctcggctcactgcaacctccacctcttgggctcaagtgatcctcgtgcttcagcctccagagtagctgagactacaggtgcaggacaccaaacctggctaaattttattttattttttgagatggagtctccctctgtcgcccagactggagtgcagtggtgcgatctcggctcgctgcaagctccgcctcctgggttcacgccattctcctgcctcagcctcccgagtagctgggactacaggcgcccgccaccacgcccggctaatttttttgcatttttagtagagacggggtttcacctagccaggatggtctcgatctcctgacctcatgatccgcctgcctcagcctcccaagtgctgggattacaggcgtgagccaccgcgcctggccaatctttgtatttttttgtagaaatggggtctcactatgttgcccaggctggtctcaaactcctgggctcaaaatccttccaccttagcctcccaaagtgctgggattacagatgtgagccaccacacccaacctctttttctcttctttgcacagatgggttatctgtgacaggaagaggaagaaggtgagggcaagtgaaagggcccatcctcacagcccttattgactcatgggtaatgatgctatttgtttctaattctgatggaatttcagttagtcactctcccatatatacagtagaaaagaggcatatcaccccaaaaatgttggggaaggaagtcctaaaccctctttgtgtgataggatcctttatttatttatttagtgagatgtgatctcactgtattgcccaggctgctctcggactcctgaacttaagcaatcctcttacctcagcctcccaaagtactgggattaccctcctgagccactgtgtccggccagacaggatcctctctggcatctgggttgagtgtcatacccgactcaacacctttcttagggctcttagtttttttgtttttgagacaggatctccctctgtcctccaggttggagtgcaggggcccagtcactgctcactgcagcttcaacctcccagggctctggtgattctcccagctcagcctcccaagtaggtaggattacagtctcatatcaccacactcagaaaattttttgtttgttcatttgtttgtttgtttgtttttgagatagggtcttgctctgtcacccaggctggagtacagtggtgtgatttccactcactgcaacctccaccttccgggttcaagcaattctcctgcctcagcctccccagtagctgggattacaggtgcatgacaccacgcccggctaattttttgtacttttagaagatggggttttgccatgtcggccaggctggtctcgaactcctgacctcaggcgatctgcctgccttggcctcccaaaacgctgggattacaggcgtgagtcaccacgcccagccaaatttttgtattttttgtagagacaggatctcgttatgttgcccgggctggtcttggctcttaggtttctctctctctgtgtgtttgtgtgtgtgtgtgtgggtgtgtgtgtggtagctgttttcctttatcttgataaagggtgaacatggcacacaggcgcaaaataaacaagactgacacctgtttcataactctggtcactattttcatccgcatctgtcacttctgatgcgtctctaacatttataagatttctctggggagggatttgacgtatccatgccccacctctttctacatttatgggattgagctctccaccagccacccatgggctgatgtctttggaatatggatctagtaccaacagagtcagaaaaagagatggggtccaatgggctacagttgggtggtggtcctgggatacacagcacagtggcctctactgggggatggcagctttccaggagaagagtcgcaagcttgcctgtgggacttgtgtcttgtggagaggacagggctgcctcagcttggggagacagacagagtgttccgggtcccctctttccgccgcagcatgaagtctctgggggcgactggactcatggcatagaagacgttggcattgtcaggaatcaggagcactggtcaggagtggagatggtggtaataggccctcacaaccttgtgtcacccccacagaggacccgggagcctcctgccactcacccgcgaacctgaacagccatgggtccctctgcagctactgccaagccaagctcattctgctgtcactgggaacctggacgacttctcacttgaaaacttgcaccacctcatgccttcccttatcataagcctgggcaacctcctaatattctccccctcaccatagagacaaggcaacctgcagtaaaagtttgagcaaactggccgggcgcgatgcctcgtgcctgtaatcccagcgctttgggaggccgaagtgggtggatcacttgaggtcaggaattcgagaccagtctggccaacatggtgaaaccccgtctctactaaaaataccaaaaaaatgagctaggcatggtggcacatgcctgtaatcccagctactcggaaggctgaggcaggagaatctcttgaacccaggaggtggatgttgcggtgagccgagatcctgccattgcactccagcctgggcaacagcacgagactccatctcaaaaaaaaaaaaacaaaaacaaacaaaaccgacaacctgcagtaaaagtttgggcaaacttagaccaccctagaccaccccccgccaaacaacttcctgctcaccctacccctcccccacaaccactcccagccaatcccatgctgctgtcaccatgaacttgaataacttcccacttccagcctgcacgagcttgtggcctcacactcaacacctgaacaaccacaagcatcctttcctaatatccagccaacctcatgccatgtacttcagcgtgaatacgctcaatcccttgcttctccctgtcagacaggacaatctcatgcttccgcggctatccatttgcctctctcccgtcccaagttcagataacttcagggtcccagtggtgaacaaacttagttctcacaaatctaagcccagatgccctttagtctcccatcccatcaggttgagcctgaacaatctcatgatgctacaaacttaagatcagacaaacttctacactcccttctctcactcgaccctagacaatctattttttctttttttttgagacggagtctcactctgtcgccaggctggagtgcagtggcgcaatcttggctcactgcaaccttcacctcctgggttcaagtgattcttctgcctcagcctcctgagtagctgggactataggcgcctgccaccatgcctggctaattttttgtatttttagtagagacgaggcttcaccatgttggccaggatggtctcgatctcttgacttcgtgatccacccgcctcggcctcccaaagtgctgggattacaggcgtgagccaccatgcccggcccccttttttttttttaattgagacagggtcttgctctgtcacccaggctggagtgcagtggcgtgatctcagctcgctgcagcctccacctcctaggctcaagtgatcctcccacctcagcctccccagtagttggagttgggaatacaggcacatgccaccatgctcagctaatctctctctctctctctctctctctctctctctctctatatatatatatatatatatattttttttttttttttttttttttttttgagacagagtcttgctcagtcgccaggctggagtgcagtggtgcgatctcggctcactgcaacctccgcctcctgggttcaagcgattcttctgcctcagcctcccgagtagctgagactacaggcatgtgccaccatgcccagctaatttttttgtatttttagtagagacggggcttcaccatgttggccaggctggtctcgaactcctgacctcaagtgatccacccgctttggcctcccaaagtgccgggattacaggcgttgagccaccgcacccagccaatttctctattttttgtatagatggggtctcctcatgttgcccaggctggtctcaaactcctgagctcagacaatccacccaccttgacctcccaaagtgctgggattacagttgtgagccaccatgcccagcccatcctacaaattgaaggtcagaaacactcccttctgtcacttgtccgtggacagtctttttttttttttttttttttaaacagagtctcgctctgctgcccaggctgaagtgcagtggtatgatctcggctcactgcaacctccgcctcccagattcaagcaattattctcctgcctcagcctcctgagtagctgggactacaggagtgtgccaccacacccgactaatttttgtatgtttcgtagagacggggtttcaccacgttggtcagcctggtctcaaactcctgacctcaagtgatccgcccagcttgacctcccaaagtgctgggattacagacatgagccactgcgcctggccggaccctggacaatcttattgtcttttaaattttaggaagatgacctttggtacctctctctcacactgagccaagacaatctcatgaccctacatcgttgggttacaggtattttatgtcctcttacctccactgattatcttacccctactctctgcctgaagcacctcacagccctgtgaacccgggtaaccttgggctccatccttgggcgtggtcagtctgctcgcctccccgctgccccctatcctgagctccaacccatccctgctcaccccggtccccaggaaggacttgaaagagctgatagtcacaggcccagggctggggcacattgtgcttctgcaaggctcgccggaccacgctgggggctttgtcctgactggtcagctggaagagaggggcgggaggtgaggtgagggccccggccccaagggcagggcagcctccagcagacccccagcccagcccctcaccaagatgcttcgatacaggttcccgtggtcattgtcgatgctgacgcggatgacacgggcctccgagctctgctgcgccgggagggggattcgagggctgcccagaggcaaagcgaagggccgggggctgggcaggtccaggctcaggggcagctgcaggcagtaaggggtggaggctacagcttggcccatctgcagatgctgagggctagaaaagcacgaacaccccagccaccactggtgcattcaatagccccacatttaaaatctcaagaaaacattggctgggcgcagtggctcatgcctgtaatctcagcattttgggaggccgaggtgggcggatcacttgaggtcgggagttcaagaccagcctggccaacgtggtgaaactccgtctctactaaaaatacaaaaattagcagggcctggtggcgcatgcctgtaatcccagctacttgggaggccgaggcaggagaatcacttgaacttgagaggcagaggttgcagtgagccaagatcacgctactgcactccagcctgcgtgacagagcaagactccatctcaaaaataaataaataaataataaaataaaataaaatctcaagaaaacatactactaccccctacacatgcagagcctgggacatgcaactggagtacattcacaagcctgcatatacaccaccctaccatatacagactttggttacctgttatagaaacagacatgaacagtgtccatatacacacaacccatgctcatacacaagaaatcctgtgtacatacatatgctgacagcggttatacacccacagcccatgccaatgaacaaccccacacatgatctcatgaatactcaggcccacatttcctcttctggtacacagattcttttctttttcttttcttttttttttgagacagagtcttgctctgtcacccaggctggaatgcagtggtgccatctcagctcactgcaacctctgcctcccaggttcaagcaattctcatgcctcaccctcccaagtagctgggattacaggcctgtgccactatgcccagctaatgtttttatttttagtagagacggggtttcaccatgttggctaggctggtctcaaattcctggcctcaagtgatccactggcctcggcctcccaaagtgctgggattacaggcatgagctaccatgcccagccttcatttccttcatttccttttctttttttgtttttcttttagagggagcctcgctctgtcaccaggctggatggagtgcagtggcaccatctcagctcactgcaacctccgtctcctgggttcaagtgattctcctgcctcagcctcccaagtagctgggactacaggtgtgcgcgaccatacccagctaatttttctattttcagtagagacagggtttcaccacgttggccaggatggtctcgatctcttgacctcgtgatccgcccacctcggcctcccagagtgctgggattacaggcgtgagccaccgtgcccagtctctttttcttcataaacaggatctcgctctatcatgcaggctagagtgccgtggcatgatcgtagctcactgcagcctcaaactcaagcgatccttccacctcagcctgctgagtagctgggactacacccagctaatttttttgacttttaatagaaatagggtctcactatgttgcccaggctggtcttgaactcccggcctcaagcaatcctcccactttggcttcccaaagtgccgggatcacaggcaatagccaccgtgtctgccatggtatgcagattcttagggacatacatgtcctcaaaaaagtgtaggctgggtgcggtggctcacacctgtaatcccagcactttgggaggccgaggtgagtgcattgtttgagctcaggagttcgaaacccacctgggcaacatggcgaaacctcatctctactaaataaaaaaaatagcagggcatggtggtgcacacctgtggtcctagctacttgggaggctgaggtggaaggattgcttgagcctgggggaggggtggaagttgcggtgagctgagattgcaccgctgcacttcagcctgggtgacagagcaagaagaccctgtttcaaataaaaaggggtgtgatgtgattgcaccctagatgacccatgggcaagcagttacacaggtccaaatctgagcacgagtcggatttatgagtgatcacccaaacagggccgtgcagatgcatgcaatcccctggatggataccccgggcgctcagtgtgcctcctgtatacactcctggccccacaatcctgtgtgtacacatgtgcatgcacacacacgtgcacacacacagagcctgggtgcccgcaggcccgcatgcacacacaagccgtcttggtaccttggtgctggggccctggggccctggagaggccgggggactgccagcaggagcatctctgcttctaggacttgaggggggtgaccctggggacacactgggggagatgcagaggctgaggtggggtggctgtgctgactcctgatcccatgatccccagtcccatcaccaagcagaatgctcacctggaggtgggggatgaggggtccccgggactcccactaggtgatgagcttttctctcgggcaagcttcctaaggatggggacaggggatgaggctaaggcaggagcagcccttgctgatatctgcccacatcaccgcccctacacacaccccgagactcacgcactgagacgcttggtgaggctgatccgccgtcggatgcgtggggagctggggcaggaggcagctggtggctcaatgacccgggagagccggtagctgaggggtcaatatgtggatgaggtggtgggggcaggaaatacaggggatggagagataagagttggaatcagttgggaggtgggtttggggtgtaagggggagcagccagaggtggcaccccacatgccagggtcagggtggtaaatgagggtcattgagcatcaaggtcttatcagagatgggacaggatggctggtcaggaggtcacaaagagattcacagggtggcactaaggaatcaaattgggtcaggattaaagtcagggtcaggactgggtgcagtggctcacgcctgtaatcctagcactttgggaggctgaggcgagaggattgcttcgggtcaagagttcgaaaccagcctggccaatatagtgaaaccccgtctctactaaaaatacaaaaaaaattagccaggtgtggtagctcgcgcctgtaattgcggctaccggggaggctgaggcagtagaattgcttgaacctgggaggcgggggctacagtgagccgagatcactccactgcactccagcctgggaaacagagccagactctgtctcaaaaataaataaataaataaataaataaataaataaataaataaataaaataaagtcagggtcagactggggtcaggtcaccattggggtcaatggttagggtcacagttatatagaaagaaaggacacagttgtcatagtcaagctggacagtcaaacataaaagttggagtcagttactcagaactgagggtcaagggttggggtcagagagtcagatgaggggtcatgaataaggtcatgggtcagataggaccaaagatggggaagtcaacagatgggacagttgagttgaatggccagctgaatgctaaagttgaggtcagaaaatcagatggggttgaaattgaggtcagaggtcaattgtgactatttttttttttttttttttgagacagggtctcactctgtcacctagactggaactgcagtggcgtgattttggctcactccaacctctgcctcccaggctccagcaatcctcccacctcagcctcccaagtagttgggaccaacggcactcaacaccacattcagctaattttttttttttttttttgagacggagtctcgctctgttgcccaggctggagtgcagtggcaccatctcggctccctgcaagctctgcctcccgggttcacgccattctcctgcctcagcctcccaagtagctgggactacaggcgcctgccactacacctggctaattttttttttgtatttttagtagagacggggtttcactctgttagccaggctggtctcaaactccttacctcatgtgattcacccgcctcggcctcccaaagtgctgggattacaggtgtgagccaccgtgcccagccacgttcagctaatttttgtatttttttgtagatatggggtttcgccatgttgcccaggctggtctcgaaatcctgggctcaagtgatccacccaccttggcctcccaagtgctgggattacacgagtaaaccaccaggcccagtctatttgattcgactggagatactgcaaggtcacaggttgtagtgggggatcagggctcaagagggggtcttgggaggagctggaggtgtgtatggagtgggtggaatccagttggtgacccaggctcagctggggtggggctgggacaggctacagggtggtcacctctgctcctcggtgagctggttctgggcatgcagggcagccaggatgggcgggtgggggctcagggtgtagctctgacagcgcctctgcagctgctggatgcgggccaggatctcccactcctggaggacgagcctctaagaccctacccctgccccacccccaccctcaggcaccaccacacccactgtagcctccactcaccttcctcctcttctcaaagttaatgagatccccctgggggcaaagtgtgtctgaattgcagcacccagggtcaagggtcaagggtcaaggtcaggggctgggatgtcaggagccccactgtagtaagggagtgtggggtggtgtcaggagtacaggtaggatcaagggtggatattgggaggcccattgtgctgggggcaagtggagctggggtcaggggtcaagggtcaggggtcagacctccaacatatccggcagggctgtgtccagcataaccaggtccgtaaggaaggtgccaaggtaggggacagggcctgggggtggtttctgcagcccccaaagctccagtcacttggggccattactgaccccatcaccatccacaaccctccctgaaggtcccacttgtccccatcccaaactgtaatcactcactgagggcaggctgcctggggtgttgtcctcttcttgggatccctcagtggcctcctcctgagggaagagaaaaactgagccaggtctggggtctccttggacaattcctcaggaacgatgcctgcagacccatcatatatacccttcatgctttgagtaatcaaaagtcagtggtaggccaggtgcgatggctcacgcctgtaatcccagcactttgggaggccaaggcgagcagatcatgtgaggtcaggagttccagaccaccctggccaatatggtgaaaccctgtctctactaaaaatacaaaaattagccgggtatggtggctcacacctgtagtcccagctacttgggaggctgaggcagaaggatagcttgaacctgagaagcagaggctgcactctagagggagtgtcgctctgtcacccaggctggagtgcagtggcgcgatctcggctcactgcaggctccgccccccggggttcacgccattctcctgcctcagcctctcaagtagctgggactacaggcgccccccacctcgcccagctaattttttgtatttttagtagagacagggtttcactgtgttagccaggatggtctcgatctcctgacctcgtgatccgcctgcctgggcctcccaaagtgctgggattacaggcgtgagccaccgtgcccggccaaaaaaattttttttaagaaagggctggacatggtggctcacgcctgtaatcccagcactttgggaggccgaggctggtggatcacatgaggtaaggagtttgagaccagcctggctaacagagtgaaactctgtttctactaagaatataaaaaactagctgggcatggtagcatatttctgtaatcccagctactcgggaggctgaggcagaagaatcgcttgaacccgggaggcggaggttggagtgagccaagatcgcaccattgcactccagcttgggcaacaagaccaaaactccatctcaaaaaaaaaaaaaaaaaaaaaaagaagccaggggttaaggcccactctagaagccagaccaccttggatgagggtagggaggagataaacagcagggagcaggccccatgagaggtggggcttgtgggtagtggcccccagggctggccttaacaaggagagaatccttgtccgcagctggatggcacaggcctgccagggatctcctgggtatcctgaatttgctgttgtttacttactttttatttcattttattttgagatggagtctcactttgtcactcaggctggagtgcagtggcctgatcttggctcactgaaggcttgaccgcccaagttcaagcgatcctccctcctcagcctcctgaatagctgggactacagacgtgcaccacaaacgcccagctaattgttgtattttttgcagagatggggttttgccatgttgcccaggttggtcttgaactcctgggctcaagtgatcctctcaccttggcctcccaaagtgttgggattataggcgtgagtcactgagcccagctcacgtgctgttctaggtgctgggcaggaaaacagggtttcactctgttagccaggtgaaatttggctgggagtgatggctcacgcctgtaatcccagcactttgggaagccaaggcaggtggatcacctcaggtcagggattcgagaccagcctggccaacacggcaaaaccccgtctctaccaaatacaaaaattagccaagcgtcgtggtgggtgcctgtaatcccagctacatgggaggctgaggcagagagaattgcttgatcctgggaggtggaggttgcagtgagccaagatcgtgccactgcactccagtctgggtgacagagcgagactctgtctcaatacaaacaaacaaagaaacaaaaaaacaaatgatgacgacaacaacaacaacaacaaaaaaccagatgtgtggttttggggatgatggaggctgggaaggcctctcagaggcagggacatttaatcagagaccagaaggaggtgagtgagcaagttgcatgcaaacctggaggggtggagaatgttccaggcccagggatccattctagattcactctaaaaaccagcgcctgattgcaatgagaatctaaatcttgcctataaataagccagacttttgacacacattttttagttttgcttatcaaggtaaagtcctcagaacattttttttgttcccaccctgtgctatgactctggccttaagtaaccttttctttgtgacttcttgtgttttgctgagtgaataaatagggcagtcactgacagtcaactataacgcaggaagtagaggaaagaaaaacgtgcaacccgccagggacaaggataaggtcattgctgagcggtagggaaggacagagtgtcctgactatagcagggagattacccctgcctggccccaagtccctcccccgacttcccgggcctaaaatccctggagtctgcatccatctctacctggaaaagaatctctctgctgctgaggtggttgttctcatcggagaaaatctgcgaaagtttcctgaaagtagatagcggttccctggaaggacaggagaagggtggtcaggggtcagtggcttgggagggtcagacctgggatgggctggggaacaggtcccgccccagctcaccggctcactgccccccagctgcgcttgagccggtagatggggttagattgcagggcggacaggatggcgcgcaaggaggagaagttccgcagttctcggcagcgctgccaggcggtggggacgcaggtcagacccaggcattatccacctttcatcctgaaacttcttcatctttttttttttttttttttttttttttttttttttttttttttttgagagatagggtctgtggcccaggctggagtgcagtggctcgatcatagctcacttgctgcctggaattcctgggcttaagcgatccacatgcctcagcctcctgcctcagtagctgggactacaggcgcgcgccatcatgcatggcttattattattattattattaattatttggacagagtctcgctttatcccccaggctggaatgcagtggcccgatctcgagtcactgcaacctccgcctcccgggttcaagtgattatcctgcctcagcctcccaagtagctgggattacaggggcacaccaccacacccggctaatttttttgtaagtctcatttttaatttttttaattttttttttttttctagaaacattggtctcactatgttgcctaggctggtctcaaactcaagggctcaagcgatcctccctctccccaaagtgctgggattacaggcgtgagtcactgcgcccagcctgatcccgtgacttgtgacgccaggtcggacccctgggtgttgtctcacatccgacaagctaccaagactcccacttattccctaggattcccttcctccctcctccctcgggctccagcccctccccagctgcccctccagcccctgcctccgaccttgacttctccggtccgggctccctacttctcccagctcccttgggacctagtcgtgcccgcggcctctctgcaggacccagaccctcctccctgaacccaagtctcaccctaggtatcaactttccaccccgttccctccctcgcctagactcgcccctatctctctccggagccctcattttttccccttgccccagggcccgcccccgcatcccctctccgcgcccgcaacacacctgggcgatgcggatccacttctccagccgctgcgccctctgcggggcggccaagcccggtgctccgagcacggaacccagcacacagccggtcacggtgttgaactgggccacggtggcgcgcacagtgggggaggcgcctgcagcccccggccggtccctctgcgaccacacggagcccaagcactcgtagagcctcaccttggagaagagctcctgggccaggggaggggtgtgggattggtgcttagcagaacctgtcccctcactgtggctcatcccgaccctgtccgggatcctcaccaagtctatgagggtcagctgctcggccacctcgtccacgctgaagtccaggagctggggaccttgaggcatgagcccttcctcttcctccgcgcaggcctctgaagagtctgggtcagaagtttgggcaactctgggaggtcctgatcattagaaagggttacaaactctcaagtttgaatccaagactggctgtgtgaccttgggtgagtccctgtccctctctgaggctcactttcctcatttgtaaaacggagagctctcttaaatttttttttttttttgagacagtcttactctgttgcccaagctggagtacaatggcgcaatctcagctgaccacaacctccgcctcctgggttcaagtgattctcctgcctcagccttctgagtagctgggattacaggcatgtgccaccatgcccggctaatttttgtatttttaatagagacgggctttcaccatgttggccaggctggtctcaaactcctgacctcaagtgatctgcccgccttggcctcccaaagtgctggcattacaggtgtgagccaccacgcctggccctgagtgtttttaaggatgtaacagcaacagtaatgttcactaagcagctagtgtggatttactcagtaactcaccactgagttactgtgagtccagtgagggaggtactattatttatccaccttttacaattaaggaaagggaggcaaagaacaatttgtcacacctttggtaaatggcagggcaggggtttgaagccgggtactcaaaggccagagaagaaaatagagctttatgatttttaacatgtattaggataagattaatctgacctcttttttttggaaagaggtgatacgacttcctggttcagggaaggctattgtcagaaagtctcaaactcagatgcaaactcgtccactagcttgctgtgtagagcatgtattttaacctctctgtgccttttttttttttttttaagacggagtctgactctgtcgcccaggctggaatgcaatggcgtgatcttggctcactgcaacctccgcctccaggtttcaaccaattctcctgcctcagtctcccaagtagctgggattacaggcacgagccaccacgcccagctaacttttgtatttttgtagagacagggtttcaccatgttggccaggctggtcttgaactcctgacctcaagtgatctgcctgcctcgacttcccaaagtgctgggattgcaggggtaagctgtgccttctttttgaaacaggctctcccttggtcacccaggctggagtacagtggtgtgatcacagttcactgcagcctcaaccttttgggctccagtgatcctcctgcctcagcctcctgagttgctgggactataggcacacaccaccatgcccagctaattttttattttttgtagagacagggtctcattatgttgccaggctggtctcaaacacctgggctcaagcgatcctccctcttggcttcccaaagttttgggattgcgggtgtgagccagtgcgcctggctgtggatttcgtttttgttttcgtttaagatcatgctgccgggcgctgtggctcacgcctgtaatcccagcactttgggaggccgaggcgggtggatcacctgaggtcaggagttcgagaccagcgtggccaacacggtgaaaccccgtctctactaaaaaaaaatacaaaaattagccgggcgtgatggcacgcgcctgtaatcccagctactcggggggctgaggcaggagaatcgcttgaaccctggagacggagcttgcagtgagccgacatcgtgtcactgcactccagcctggcgacagagcgagactccatctcaaaaaaaaaaaaaaagatcatgctaccagactgctataaagtgctgaacaaatatgaataattttactttagtggattttgatggtggcaccctggaggggaaactttggaaactgggatcctgaattgtgccctctagcctccaaatgtatctccagacatttgtgtctttgaaaaacctgtttgtggctggtcccaaggtagtgacttatctcaattgattgttcacagttacagatcgaactccttgttctactctttccccccttctcactactgcacttgacttgtctttaagaaaggaagaaggggtctggcacagtggctcacacatgtaatcccagcactttgggaggccaaggcaggcgaatcacttgaggtcaagagttcgagaccagtcgggccaacatggcgaaaccctgtctctactaaaaatacaaaaatcagctgagcatggtggcaagtgcctgtaatcccagctcgggaggctaaggctagagaatcacctcaacctagaaggtggaggttgcagtgagccaggtccacgccacggcactctagcctgggtgacagagactttgtctcaaaaaaaaaaaaaaaagaaaagaaaagaaggccgggggcagtggctcacgcctgtaatcccagcactttgggaggccaaggcgggtagatcacgaggtcaggagatcgagaccatcctggctaacatggtgaaaccccgtctctactaaaaaatagaaaaaattagccaggcgtggtggcgggcgcctgtagtcccagctacccaggaggctgaggcaggagaatggcgtgaaccggcgaggcggagcttgcagtaagccgagatcatgccactgcactccagcctgggcgacagagcgagactccatctcaaaaaacaaaacaaaacaaaacaaacaaacaaacaaaaacaaaaagaaaagaaaaacatgtttgcaataatatgcacctagaacctgactattttgttcataaacacaaatttttttggctccaagaatgcaaggaccacgaaagtctgggctttgttttgtttgcaaattgcaaatgttgttcacaagtttggaaaatgatgtccccagaacctatgttgctgtctttgcctcaccagtgccctcctgtgcgttcgttggtgcttgttgctgtcagtacaacagcaccgtgacactctactgtgacgctaggacaggcaaagacacgggacaacctcatcatgtgtcctagtggggcatacccaagcattacccattgaaaacatggtttattgctgtgtaagttactctcactttccttctcctttgtactagttatggcatcatactattattttattttatttttttattttgtgatggagtcttgctctgtcgcccaggctggagtgcagtggctcgatctcggctcactgcaacctctgcctccagggttcaagcaattctcctgcctcagcctcctgagcaactgggactacaggaggtgccactatgcccagccagctaatttaaatatatatatatttttttattatttatttattttttattttattttattttattttttattttttttagtagagatggggtttcaccatgttggccggactggtctcgaactcctgacctcaggtgatcctcctgcctcggcttcccaacgtgctgggattacaggcatgagccatagcaccctgccccaatactattattttaaaataatctttgtaaatctgtgtaattacctctttcatcttgaattaggacaggtggcattgcaaaatattagtttttagaagtgggtactgggctgggcacacctatagtcccagcacttttggaggttgaggtaggaggattgcttgagaccaggagtttgagaccagcctgggcggcgtagtgagaccccatgtctacataaaaaaatttttaaagttgcgcatcctgatgcacacctgctgtcccacctactcaagaggcttaggagggaggatctcttgagcccaggaggtcaaggctgcagtgagctgtgatcatgccatagcactccagcctgggtgacagagcaagaaactgtctctcctccccccaccccaaaaaaaagtgggccctggaaaaaaaaatgccctacatctaatcaaacctttaaatcttacagcaattatggggatagagaaacatgctgcatgaaaccatgaggtaagtcgaaaagaatgtgagacatacctcaggaaaaatgacccattttttttgccctctaatggcttcaaacaagaggcaagggggatctgttacagaataaaagagacttaggaacaaacgaccggtagggcgtggtgactcatgtctgtaatcccgacacttcgggaggccgatgtgggcagatcactaaaggttaggagttcaagaccagcctggccaacatggtgaaaccccctcactactaaaaatacaaaaattagctgggcgtgttggtgggcacctgtaaactcagctactcaggaggctgagccaggagaatcgcttgaacccaggaggcggaggttgcagtgagccaagatcacgccactaccctccagcctggacaacagagtgagactccatctcaaaaaaaaaaaaaaaaaaaaaaagagaagcaaacaaccaaataccttgagtagatctttggatttcaatttgaagaaacaactattcctccttcccccagctctatcgcctggagtgcaggggcatgctcacagctcacggcagctttgatttcccggagtcaagagatcctcccatctcagcatcctaagtagctgggactataggcatgtgccacaacacctggccagaaacaactgtcaaaagaaaatttagggctgggtgccatggtgggcacctgtggtcccagctactcaggaggctgaggtgggagggtcaggagttcaagcccagcccaggcaaaataggaaaacccagtgtccaaaaaaaggttcaggcacaaacaggggatttgaatatttgaatatagactgggtattttttctgtttttgaggcagggtctcgctctgtcacctaggctggagtacagtggcataatcacggctcactgcagccttgaccatcccaggctaaaatgatcctcttgcctcagcctcccaagcagctgggactataggcagtcaccaccatgcccagctaattatttgtagacacaaagtttcaacatgttgcccaggctagtctcaatctcctgggctcaagccatccacctgccttggcctcccaaaatgctgggatcgccagcaggagcctctgcatctggcctggattggattttttttatatcaaatatttctgatttttttttaagtatgaacatgaaggttattaaaaaataaaaataaaagggccgggcgccatggctcacgcctgtaataccaacactttgggaggccaaggtgggcggatcacctgaggtcaggagttcgagaccagcctgacaaacatggagaaacccccctctctactaaaaatagaaaattagccgggtgtggtggtgcacgcctgtaatcccagctactcgggaggctgaggcaggagaatcacttgaacccaggaggcagaggttgaggtgagctgagatcctgccattgcactccagcctgggcaacaagagcgaaactccgtctcaaaaaaaaaaaaaaaaaaagtaagcctgttgtcagacatgtgtacccaaaacatttatgtatgaattgacataagcccgggatttgttttaaaatcatcctgaaaatatttttttgtgaaattgatcatcgttgatgataggtgatggatgtctgaatgttcttcatactattctctctacttttgtatatgtctgaaattttccatagcaaaaagtgaacccaaaataaagttgttaaaataaaatagatgagcatggtggtcatctactttcttctaaactacatggtgcaagtgtagtcttagctactcaggaggctgaggtaggaggctcacttgagcccaggagttcgagtccagcctgggcaacagagcaagaccctgtatctaaaaataaaattcatagtcgggtgcggtggctcacgcctgtaatcccagcactttgggagaccgaggcaagcggatcacgagatcaggagatcgagaccatcttggctagcacggtgaaaccccgtctctactaaaactacaaaaaattagctgggcctggtggcgggcgcctgtagtaccagctactcaggaggctgaggcaggagaatcacttgaacccaggaggtggaggttgcagtaagccaagatcgcgccattgcactccagcctaggcgacagagcgagactctgtctcaaaataaaataaaagtaaaaataaataaaataaaataaaatgaaataaagtgtgtcccagggcctagcacatagaaggtcttaaacaaatgttaattttctcctctgacctcaaagaaactagggcagcactttccatataattctctgcaatggtggaaaaattatctatctgctatgtccagtgtggtggctgagcactcaaaatgtgggtagtgggattgaagacctgaatttttgcctttgcttgactggattttgaaaaagaaaaaaaaaaaaaaaaaaagcgggccaggcatggtagctcacgcctgtaatcccagcactttgggagaccgaggtgggtggatcacctgaggtcaggagttcaagaccagactgaccaacatagtgaaacgctgtctctaataaaaatacaaaattagctgggtgtggtggcaggtgcctataatcccagctacttgggaggctaaggcaggagaatcttttgaacctgggaggaggaggttgcagtgtgccgagatggcgccactgcactccagcctgggtgacagagcgaggctccgtctcaaaaaaaaaaaaaaaaaaaaaagggcagggtcaggcacagtagctcacacttacaatcccagcactctgagaggttgatgctggaggattgcttaagcccaggagttcgagaccagcctgggcaacatggcaagaccccatctctaaaaagaaaagacctgaattttatttaattttaattaattaattaattattattataattttgttttttggttttttttttttaggcagagtctcgctctgtcacccaggctggagttcagtggcttgatctcagctcactgcaagctccgcctcccaggttcgcgccattctcctgcctcagcctcccgagtagctgggactacaggcgctcgccaccacgcccggctaatatttttttgtatttttagtagagacggggtttcaccatgttagccaggatggtctcgatctccgaaccttgggatccgcccccgtcggcctcccaaagtgctgggattataggcatgagccgccgcgcccagccaattttaattaatttaaatagcgacaggggctagtggataccacagtgaactatggagctctaatgacttggaatcagctggagaaatcatatatatatatatatatatatatatatatatatatatatatacacctatatatatatacctttatatatatatatacctttatatatatatacctttatatatatatatacctttatatatatacctttatatatatatacctttatatatatataccttcatatatatacatatatatatataccttcatatatatatatatacctttatatatatatacctttatatatacctttatatatatatatacctttatatatatacctttatatatatatacctttatatatatataccttcatatatatacatatatatatataccttcatatatatatatatatatacaccttcatatatatatatatatatatatatatatatatatatatacctttatatatatataaataactgagactttgtcaccagggatagagaagtggctgctactttgtaaattggacaggaaggtggccactataatctggagattaagcgatggggattagggatagagatgcttttgtgatgtggatcagatcaaatacagatgggtgaaagatgatacttcctaagcaggatgcaattattcagcaaactaatctgtgttgttcctgcccctggggacagagctgggagcaagaacaacaggtcctcctctcatgcactcacagcctatgagatgagcaaaagccaataatcaagtaaggaggctacgcatgcacaatggcttatggctgtaatcccagcattttgggaggccaaggcaggcagatcacttgagttcaggagtttgagaccagcctgggcaacatggcacaacctcacctttacaaaaaaattagccgggcgtggtgacatgcgcctgtggtcccagctactcaggaggctgagacaggagaatggcttgagcccaggaggtggaggttgcagtgagccaagattgtgccactgcactccagcctgggtaacagtgcgagactctgtctaaaaaaaaaaatagataaaaaaataaaattaaattaaattaaatttaaaaagaaattcaaaaataagaaaaattttacaggctaggtatagtggctcgcgcctgtaatgccagcagttttggagacccaggcgggaggatcacctgagtccaggatgttgagcctgcactgagccatgatggagacactgcactccagcctgagcaacggagcaagaccctgactcaaaaaaaagaaaataaagacaagtatcaaggcaatggtttgtagctagaaacacagagcatcctgacccaacggcaccaaggagggaaaagtattagacacatgctaatacttcagacaaagaatttgtttttttttttagacggagtttcgctctggttgtccaggcgagagtgcaatggcacgatctcgactcaccgcaacctccgcctcccgggttcaaacgattctcctgcctcagcctcccgaatagctgggattatagacatgccccaccacgcccggctaattttgtatttttagtagggatggggtttctccatgtttgtcagactggtctcaaactcctgacctcaggtgatacaccatccttggcctcccaaactgctgggatacaggcgtgagccaccacgcccggctgacaaagaattattatccccattgtaaagatgaagaaattgaggcttagagtttaaaatcttgcttaagttttgtagctctgagaggggagagaaagcctgtgtgggaagaagcagacaggaaaggccttctcagaacacgactggatctgaaaacccctcacctgtccacacctgaggcggctcctcttcctgctctcgctcagcctcctccaaaaaatcttccagaagcttctctgctttttgagcctcagcactccctggggccgcccagcccagaaaggttcggacactgcccaggtccgaatgggcaggggggtctcggaaatcctgagggtggtcctgcagccaggagcccagcactgacaccacagccctggccagagaggcagggtctcagagctgggtccagagtgggggacatagaatatgactcctggtaccttttttttttttttttttgagatagagtcttactgtgtcaccaaggctgcagtgcaatggcctgatcttgactcactgcaacctcagcctcccgagtagctgggactacaggcatgcgccaccacacccagctacctttttttgttgttgttgtatttttagtagagacagggtttcgccatattggccaggatggtctctaactcctgacctccagtgatccacctgcctcggcctcccaaagtgttgggattacaggcatgagccaccacgccccacctgactcccagtctcttattacccaacctgcaattttcaaaaccccagtccgactgctaacctttgacctcttggatttccctccccgcactcccctatctggatgaaggacccacctcaggttcttgttgaagctcagatcttgtaccgctgtcttcttgatctctaccctgggaagaggccccccagcaggtgaagaagggggaacctagagggggcttaggaagagggctctgggtctgggaggtgtttccaggttccacacctgaggaggtggaggggggtgcccagttggggttctagggtggagaatacggaggttatggttcgctactgacccgggaggtgggggcggtggcattggtggcagcagaaagcccagcaggcaggcagtgggtacaaaggtccggtaggtggccaggaaggcgggcatgaagctggggtcctgctcacggtctccaaacaccaactctcccaccagccgctccaggcgcgctgccctcagcaccctcaccttgctggttcgatagtggaggaaggtattggcaatggggctgggagcctgcaggaggggagaggtggccatgagagagcaggagtggtcctcacagcaccccttctctagtcacattcatcactagcaccactctttttttttttgtttttttttttgagacagagtctcactctgttgcccaggctggagtgcagtggcacgatcttgggtcacttcaacttctgcctcctgggttcaagcaatcctccttcctcagcctccaagtagctgaaactacaggcgcacaccaccaagcccagctaatttttgtatttttgtagagatagggtttcaccatgttggtcagactggtctcgaactcctgacctcaagtaatctgccccccttggcctcccaaagtctcccaaagggctaggattacaggcgtgaaccaccgtgcccagcccctagcaccacttttttttttttttttttttgagacagaatctcactctgtcacctaggctggagttcagtggcgtgatcttggctcactgcaacctccgcctcctgggttcaagcaattctctgcctcagcctcccaagtatctgggattacaggcacccgccaccaagcccagctagttttttcgtatttttagtagagacggtgtttcaccatcttggccaggttggtcttgaactcctgacctgatgatccacttgcctcggcctcccaaagtgctgggattacaggcgtgagccacctcgccccgcctgtagcaccattctttcatgtgattcctctgtctcccggcttcttggagttattgttttggtttgttttttttagaaacaggtcttgttttgttgcccaggctggggtgcagtggcacaatcatagctcactgcagcctccaagtcctagactcaagcggtccctctgccccagcctcctgagtagctgggaccactgctgggcatcatcacgcacagctagttttttaatttttatttttattagagagaatcttgctgtgttgtccaggctggtctccaattcctggccttctgccttggtctctcgaagcgcagggattataggtgtgtgccccactccctgcccgcttgaagttattgttcctccccatccacaaatagctcctgcaacttgccctggaaaccctccctctcccatgccctgtcccctactccctctcccgtcccctccccctcccgtcccctcccccccacccccccgccccgccccacacactcttttccacccagggcttccctcagccctcctgtcgcgcttcactggctgccccatccgccctcacctagccacttctaaaccaaccccattccaccttccagccccggccctctaaacctgcctttcccaactctgccgtccagttctgtccttaccaagttgtccctaggctcctctcgggaactgcgcggccatcgcctggccccaccccattccctggatctccccccacttacctggccgcccccagtcccctttctacctggtcgcctcatctggtcgcctccgagcccctcccttccttccgcccactgcacctggcggcctgtgctcggctctccagctccgccctcaactggtcgcttccggccccgcgccacccaccaaaccccctcctcacctggctgcccccggggccctccgccgggctcctgcgctgactgcgctgccgccgcagggagacactgtacaccgcgccgtcctcggtctcttcaccccagtcctgcagcggtgcctggacgcacaggcggactcagggcaccaaaggggcacaggtcctggggcctcagcctccttggccgctcggactcgggccgagtcctcctgctgcatccccacgccccttcccggccagaagctgcgagactagggctggggtcccaggctagtcccctcctcgctgcgggtcccctcctcccaggtcctgaggacatggggtggcatttggggatgtcccagggcccagtctaatagaacctgtctctagctctttctgccgactgcgctcagagactcgcgcccccatccctaagaggaaccagtcgcttcactgggtcaagggccgcgagtccccaggaggggactccagggcaagttcagattgggagcagataccgtccgacgggcgggcgcttggagtttctggacctgcgggtcaccagggatgcggggtccggggatcccttgtccccttaccagggccagctctttgcctgctgtgcgctccatggccggcgcccgtccctctcagtggcgccgctgagtgaggcggaagggccggcgggtggcgggtggcgggcggcgggcagtggccgggcgctgaggccagaggggcggagcggccgagctgctggggcggggcggggcagggcaggccggacccagcctctgggtgcctccagccggacccagcgccagcccaggagaggtcctggctcttccgctgggtgcctatcaatctgtccccagaagaaaggacatatctgtccccaaggggtcttttttgtatccccagatgtgggggagctcctgtgtgggggcatgtgtgtgtccccagaccagagtcctctgtcctccagtggaaggggctagcttgatcaagtgtgggggcatcttccactttttattattattgctattattttgagatggagtctcgttctgtcacccatgctggagtacagtggcttgatcttaactcactgcaacctccgcctcccagattcaaaggattcttgtgcctcagcctcccaagtagctaggattacaggtgccgccaccatgctcagctaatttttgtattttttgtagaggcggggttttgccatacttgccaggctggtctcaaactcctggcctcaagagattcgcccacctcagcctcccaaaatgctgggattacaggcatgaaccacggcgcccagccttattattttttagagacagggtctcactcctgttgccaaggctgcagtgtagtggcttgatcttggctcactgcaatctccgcctcctgggttcaatccattctcctgcctcagtctcccaagtagctgggactacaggcatatgccaccatgctcagcttttttttttttttttttttttttttttggtaaaaactggttttcaccatgttgcccaggctagtctggaacccctgggctcaagcgacacacccagctcagcctcccaaagtgctgggaatataggtatgaatgagccactgcaccccgcccttattttatttattgagacagggtctggctctgtggcccaggctggagtgcagtagcacgatcatagctcactgcagcctggagctcctggactcaagtgatcctcccaactcagcctcccaaaatactgggattacaggcataaaaccactacatcgggccatctcccatttttaagctccatctgcgtcactagctgatgggagtcatcatgacccaggttggaggaggcagtctgtggccctgggttttcagggacagccgtctcttgggtggtgcagggtcaaaaacagatgaatacccagggtcatggtcggtaacatttattgcgcaactctgaggccggggcggacccagctggggagatttactgtgggaacgtctggcccggccccttcctcccctccgggcgccgctggccgcctccgttcccggtccgggccgcgttcagcccctgaaggggccccgtggggcctgcgctagacccggagggatcgggggctccgaagggggccgcctggtgggtgtcaggacgagtctaggacctccgagag

SEQ ID NO: 514 - DNA, 149885 bp, Homo sapiens
  source 1..149885: mol_type = genomic DNA
tagagatggggttttgccatcttgcccagggtggtctcgaactcctgagctccggcgatctgtccgcctcagcctctcaaagtgctgggattactggcacgagtcaccgcgcctggcctcttccctggctctctctgctgggtcatcaagggctggctgtgtcccttggccataggtcgcagctcctgttaagtatctctctctctttgtctggcttcctgtaaccgctctggccgcgctccttcagccctgcaggtgaaaacagttccctccctgctgttacctgtcccaattcagcaccgccctgtggcttcccggctcccggaccgcgcctctgccagcgggaaccctgctggactcttaattaattgtcccactgagaatgccattggtttcctcctgggatccaaactaatcacacaagactagatgatggagagctgccaagaaaccatggggcggtggcggggacggaggggaagcgttttgagcccatcaaggcaggtgacaggaaagaagcaaacccgagaggggccgagtccctgggcgggcggcagggctggagcgtgaacagcagcgacggatgcgtctcgagggaaaaacgcggcgggagagaatgaggggaaggcaggaaggaaggggcagggagacccagcgccggggaaggaagacacgaagagggcgaggaaggaactccggcctaaagggtgaaggcggcggctgggacagggccagaggcgcaggccggggccgggcagctcctcctctcgtgccagcggtgcctccggtcccgccctcgctgctgcccgcgctccgggaggggcagacccgctggacgccgcagtcaccgcgccgccttcgcgggcgtcccggggcccggagggaacggcctttcctggctgtccccgtggcttcgccgcgggaactcacgccgcccccgaagctgccgccagctccgggcatctgcccagccgaaaagccagggcgccggggcctgactccccacagccaggtttcccgggcacagagacccaacgggagcgggacttcctcggacaccgacggcgaaggacagagacagcccaggcaggggcggctcctcccggccacaccgacctgcccttcgcagggtgtcccgggccagcggaggcagagaaaaccagcttgcgggaacgcagtcgctcccagcaccagggccgggccagtgcgggtacacaccgtgcgcaccagcgccgccgcgcccccaacggaagtcccgcccccggccgtggaggccccgtccctcgcttcttctcatccctgcttccctggcagtcccgttaccacgctgtcccgacgcgaaggccctcgccccgccccgtgccccgcccccgcatcgccccgccccaaccccacccccttggccccgcctcaccaggttcgccccgcccctctccgtccccgcccctcctccggcctcggccccgccctcgcctcgaccccggggggcggtggctgccgaggcgaccgttgcgcgcgcgggcggtggcgcgggccgaagcgcccggagcgggagcgagcggcgcggcccggtaggtgtgcggggccggggccggggcgggggcagggcgcgccgcctccgctctttctttcgtctccggggcgcgcgcccgcgccctccgcctcccggccgatcccggccagccctgcgcggcgcccgtcccctcggggtcgccgcccgcccgccctgccttttgttcgccggcctgactcaggctcctggtcccgggcccggcgcggggcggggcggggcgggggcgggggcgggcggcgcggggcgcgggcctgtggggcctccggccgggcgggtgcgcggcctcctggggccccgcgctgtgaggcccgcccgggcccttggcgggacccgcgggggcggcgccgggcagggggtcccgcgggcgagatgcgcccgggagcgctgggagggttccctcgtcggactccacgagcggccgctttgttagggcagaagctgccttccgagacccgaactccagacgcactgcagcgacctggggtcgcctcagccgcggtgccgcgattgtgcagtgtagacagaggggtcccagagccgtgcggtgtagacagagaggggcccaaagctgtggaatggggacagagaggggacccagagctgtggagtgtagacagaaagggcgcccagagccatggagtataaacagtggagtgtagacagagagggggcccagagctgtggagtgtggacagagagggggcccagagccgtggagtgtagaccgagagggggcccagagccgtggagtgtagacagagagagggcccagagccatctagtgtagacagagaggggacccatagctgtggagtgtagacagagtctcatagccgtgcagacagagaaggggcccagagccatggagtgtagacagtggagggtgaacacagagggggcccagagccgtggagtgtggacagagaggaccacctggcctctcacctgcttggtcacttgctgggaatgtgtccctgggcaggtgaccaccttctctgtgcctgagtttcctcattggacctgtctttggagctgctgcaagggctaagagtgtctttgtctgaagtcctcagcgtggtccatgccgtcctgtgcagggcccttctgaggccacagggacgtgcaggatggccggcaaggcctgcacagaaggggcgctggggggccttcccaggcaaggcagcagccccaccattcacagcaaggagactaccaaggagggcagagaggcggctttgggcagcaagggctgctggggtggagtcctgctggccttcccctagagaaggcgacgtggggagggcagagcaattctgagtaagggagaaccagtttatatttcactttagaaagtaattgtcacagtgcgaagtttcttcccctgaaaaagcgatataaaaaggtccatcgtggccagtgcttttggggacttgagatgatgggtatccggtgcccgggccctgcgtggtgcctcagctggatgctctgcaggtgggggaggccatgttggctgagggcaggggctcaggcaagggcagtggggtggctgagcctgcacaagttggtgcacccctgtctgggtctttttcttaaaactgcaagtccagccttatctctgagacctcctgaggctggaacctgccatcagacaggcttacagttctagccctggtaactgcaatgatgcggatgcctctgtgactggcagagcagagggaggagcgacagggcagtggtgaccggaggtctcagggaggttgacaaagacaagggcggaggaaaggcccctcacgtggactggaggtacagtactgacctgtggagtgctcaggagagggcaggggtggcgcggcctgagggcatgtcctggggagggtcaggaggtgggagggaggcactcgacaggcactgcaaagaggagggaatccagggtcaagggctggctccctttctgccctgtttaggatgagggtctcggggaagaaggggtggccaggccgaggagacctgtggcgctgggagctgggactcagtgaggtcctggaggtggtgagggcccagaggtgacagctggtgacccagccggcctggctgctgctgtgggaaggtcgggggtagaggagatggaggacaggctgaggctgccgctagtcagcgcttccggctgatagaagggggctgagtgggctctgcaggcctggttgacagtatgtggatcacattgactttggacctttatttttgtctgagactgaccaagcaaaataatcaggctgggctgggtgcagtgacttaacgcctgtaataccagcactttgggaggctgaggcaggtggatcacctgaggtcaggagttcgagaccagcctggccaacatggtgaaaccccgtctctactaaaaatacaaaattattcgggtgtggtggcagacgcctgtaatcccagctactcgggaggctgagacacaagattcgcttgaacctgggaggcggaggttgcggtgagccaagattgcgccattgcactccagcctgggtgacaagagcaaaactctgtctcaaaaaaaaaaaaaaaaaaaaagctccatctcaaaaacaaagacaaaccaacaacaacaacaacaaaaagcaggctgaaggaataaacaactcattagttacgacttaacacatgcagggcttcaagcacacaaaatcctaaagcccagaccattttacattttatttgaatttggtggaattcctagaaacatttcccttcccagttgtatgagtttcctattgctgtgtaacaaagcaccactcacttagtggctgaaaatggcaaaagtttatttgccctagttgggctgaaactggtgtcatcgtcagctggccaagctccctcccgaggcactggaggagaactgttggcccgccccagtcagcttctggaggctggaggagagccgttcacccccctggtcagcttctgggggctggaggaaaactgcccccctggtcagcttctgggggctggcctcattccttggctcccggctcctgccctgcctccattgtcacatcgctgtctttctcctcctctttattttctccttttagagacagggtctcactttgttgcccaggtggagtgcggtggcacaatcatagctcactacagccttgaactcctggctcaagccatcctcctgcctcagcctcttgagtagctgggaccccaggcatgtgccaccatgcccagctaattttttctgttttttttttttggtagagatggggtctcactatgttgcccaggctgatcttgaactcttagcctcaagtgatcctcctgccttagcttctcaaagggttgggattgcaggcacgagccaccgcgcctagcttctgtcttcttctgccatgttcaaatttccaggataatctccttgtcctgggagccttagtttactcacatctgcagatccgtattgccgtatggctttcacagtcccagggattagggcctggatatctttggggatcgctattcagcctacagcaggctcctcacttgtcttcgaaatgacttcacttttcccattgtgtgcgaggagcacccgtctcatgcctcttctctgggatgggcagggtttgtccagggaaggtccctgtggtttcacttccctgcccttggggagaggcgggagccatcctggaaacaggtgtcctgggaaggaagacaagccttgctcaggatgcaagccccagtcatgagaggttgtgggaggtcactcatgctgtgcctttttaggaggtggggtcgttaccagttccaaactggatactccacacagtgctcatgcagttttacctgtggttttgggggccaccgttgcagaagttgcctagattcttccatgaaggagcctcttgcctcgggctccgggcaaggaactcttgtgttagaagttcccttcttctgtgtcttttaaggtctggacttcagtgaaagagaaaagaaacatctagtttgttctttctgtttttcttttctttctgcttttccatgcacttgctgtccccaactctgtaatcatggtgatacccgatacgcatacacactctactcacatatcttttcctacatctttgtgtcccttagcagtgatcttagttgtccttccagcatgcctgaaaaagggctgagtctgtggattgaagcgtccagttgtaggcattctcctgccctgcctggccgcagcccccagaggcgggatcctaagtggtctgttttctcaggcatttactgctgttgaagctgctcctttaaagcttaagacattctttttttatttctcccaaaggccgtggggaggtttagctctcctctgtcccaccagcctccctgtccctctatgtgccatcataatcactgcatttttggtgaaatcgacagtccttgctcttgtgtgactgtaagcattgctcattactgcgccaaggagtgccctgagcacaggtcctctcgcacagccctgtggattagcatcttctagtcacccacctatcaaaatggtttgtttttcattgcatccaggacactagccccatccccacccctttgggattggagccttctccctgctctcgtttgccctggtctccaggagacctgctgcgccgctgtcacctgcatttcccgctgctgtcctccatctgtggggctccctgtgcactgggtcctgctcttctctctctgcttggctcactcctcgttttgctgaagtcctactcttttgatacctaagaaacatcacataggtattttttttggtccttgatttagaaaacatctttattttactctccaattaccttttaacttagctgggtataaaattttagacaatgattttttcggaattttgaaaatgttgcttcattgcatttggtttctgtgctgttgaggtctgacgccattctgatttcagttcttctgtgtgtgatctctcctgcctcaagctcatagaagcggctcttttccctcagtgttctgagaagcccgataatggcatctgcttccgtttattgtgctgggcactccgtgggccctttcagtctgaggatagaagtttttaaatttcaaagataattttctttcagttttgctgttttctctttctggaacttttatttggaggttggacctcctaggttgatcctctaattctcttttttctcatcttgttgatctctttgatgtttgttcaattttttttttaagagacggagtctcactcttttgcccaggctggagtgcagtggtgcagtcatagctcgctgcagccccaaactcctgggctcaagcgatccccctgcctcaacctcctgagtagctgggaacacaagcatgcacccccacaactggcaatttttacttttcattttattttttcatagtctcgtcatgttgcccctttgctgtttctaagaagtcagtcactctggtagctgcgttgctcctttatgttatatgatgaggtgctttcaagctcctcctgggatttttggcttccagcagtttgattgtgatgttcttaggagggtttgctttgtatttgtcctgctcagggtttgttgaacttcttggatatgtaatttttcaccatcttcaaactgctattaagtttcgtgcattttaaaatttcagttacagtagtttttatttctagaattttcacttattttttatggttgccatttctctgctctgtcatttgtttattgtgatcatactgtcattaaatctttgaacacatactagcggctttaatgttcttttctgctaatttcaacacctgcattacctcaggatcaatttctattggcttcttccaactatgggccacatcttcctgtttctttgaacatctagtgttatttgatggtgtactggacattgtagatggtaactgtagtgacttcttttttctgaagagtgttgatttttgttctggaagttaatttgtctggactcaaatgaaaatctctgctgcagtctctgcttggtgctgttgaccttccggctgcctccttctgctggactctggggtctctctgtgcatggatggctcaccactggccaggacctaggcagaatttactaacagatctcacgactgcctcttccccagtgacctcctttctgagatatgcccctcactgttcagccacccagccctccccaagccctatcttggactcttcaagctgggaggatcacaacttctacctgtgctctagccatttttagaaacacttgttttagttggtgcagctctctcctttcaggggacaactcccctccactttctgcctgcttttcatagctctccaggacctcccagagttggtttttgtgtcttgtgtctggttggaacttgatttagcagcgtgggaggatgtgggaactgtcaatttacggacagagctgccggcactttgattagtagccaggcattggtctttggcagtttgcttgtttttctcatagagcgttcaagtgatcagggagctagcactccagttaaaagaaagttcttcccctaccaacacctgacttctggatcttaagtgttagcctagaatagatgcatttcctggatgggtcaactaacctgatgagcctggtggcagagagactgtgcgtcctttattgccttcctctgatgcgagcaccataaggatagggcctatgggctcttctttgactttccagaggcccatgacccctggacccctggaccccacgcaggtgtgctaggctgggtctcctccaggctcactgagggtgggaggaaaggctcagcctggcctgtggctgctgttccgcggtcttcacctcacccccacagtcttttctaactctgtgctgcagtttgtctataaaataaggttgttgtgaggtttaaatagcatgatgtgtggaaaacggttaggagcagtggctgatacctgggagtcctggtcaccattagcgatggtgctggtggcatcgctgcaggcttgcactctgctgggaacaggtgctcgcctcggaggcgcccaggccttcactgagtgcatctgggtctggcccccactgtgtgccaggctgctggagacagcagtgccgcgggctctgctgagctggagtgcagtgaaggtgctttaggcagggtgaggggctggcttgccccgcctgccagagcgccctgcactccaggggcctggagtccagcctgggagttagtagacaatcgtgtggaagagggacagctctgtggattccagcctttagcagccagattcctccctgcgaggctggggacgttggccctgggaggaggaggactgcctgggcccgcccctcctaggagttcctgtgcctgctggcacaaattatcaccagcgaggggctagcccagtagcagcccccggtcccgtcacagttctggagactggaagcctgaagtcaaggtgtggcagagctgtgacccctccgaaggctttagggggagacccttcctgcctctcccagcttccagggctcccggcattgctaggcttgtgtttgcattgctccagtccctgcctctgtccccatgtggcattctctcacgtggctttctctgggtctgtgtgtcccttttgcctccctcttttacggacacctgtgattgcatttaggacccacctgggaaattcaggatcattgcctcatctcagaatccttaacataatccttttccaaatagggtcacaatcacagcttctggggattgggccctggtatctttggggctgccgtttgccccactgcacctgcctagacctgggggtggtgaggagccacgtgaggaggtcacaagggcacagcgcttcaggccccaggagcctccccggctgccctcctctgtaacacggggtctgtccccggctgccctcctctgtaacacggggtctgtcctggctgccctcctctgtaacacggggtctgtcccggctgccctcctctgtaacacggggtctgtccccggctgccctcctctgtaacacggggtctgtcccggctgccctcctctgttacatggggtctgtcccggctgccctgtgggcaggacaggtgcacagcttgtccttaacacgcttggtgctgaagaggctcacagtactgtgaacattggcaatgattttgtctttctgagagtggataagatactaaaagcaaaaggaccccttcaggcctagtgaacacaaaacagtggtggaaccctctgtgtctttttcccttgaatcctgtaggtgggttaccaggtgtcggtgaataggagaatcacatgtaggaggctgattggaaataagacccatttgttgatgagaaaaattggtttcagtctttctggggtgttttgggctaaggagaggcccgccagggccagggatggagagtgaggccggggtccgagggccggggatggagagtgaggccggggtccgagggccggggatggacagtgaggccggggtccgagggctggggatggagagtgaggccggggtctgggctgtgcttgtcctttcctgtcctttacctgccactgtgggttttgtccaaggaagcaggtatgagggaatgaaggggtggggggcgcagaggtgacatgtccaggtggggtgatgggggacctccgaggtgccagcaaggaggaggagaagaacatggacgttggaatgagccaggtttaaacacagcctctctccagggctagacttgccaggtacagtgttgccgcacagcatttggggcgcactcatactaggaagttgtcatgtatctgagattcacatttaactgggtatcctgtatttttttttttttctaaatctggcaactccatttatagtctcactctgcacagatttaaaaaccacaaacagaagtaaatatcaagtagagataaaaagggaaagtcaaatacaaatggaaaggaagaattgaggaggtttgaccttcagtgttccaaagatactgaaatagtgtttgtttctggaatcaggaagtttcatcagctgtggcgcacgggggtatcctggagggctgtggcctccgtgtgtcctgttcacttttcctgaagccaggtcatcaccaggccggtgcccagagtgagctcacagggcaggccctgctggactgaccgcagggtcaggttggcgcctgtgacgtggctttgggccctggccgttgtggtctggggtgggtggggttgggggcttggctcccgctcttgtctgagtgtctttgtggtgtggtgcttctgcaggattggagtttctggagttcacgttgtgtggccttcaaaaccacagagacacgggcaggtggggcctgctgtgctcagcccctcccagcctcttgtgactggtgggctccgctccccctgcttacagaagtggttcctcctgccccttgcacgggggcctgtgtgtgtgcccacagcaccacatcagaaagccccggaaggctgtggggtgacgtctctgtgcatgagaagggaggcgccccaggagtgaacaggcacagccggagtgtggggcccctgctctgtggctaggttctcagagcctagaggctgggggtgttggaggagtcattgggggcctcaggtaggaggtgagctatgagctgagccacagagtcgtggggggaggagagagggcccgtttcaagagagagtgatttttgcaaatggtgtcctcctgcatggcctggccctgctgtgcactgtggcattgggctgtcttaactgtctgtgaccccggggcagctggccctgggagttcaggaccgtcactggttgcctgttcgtagttgcccacctggagctgctgcagaagccacgagacagttcttgaatgaataaacgaatgaatgagtgagcaggaaaatcatggggccacgaggaagtgggtctgaccgagggggatgttgaggtttggggagggacccagtgagagagcctcaagaggctggacccagtgggacaggtgcttgggcagggattaggaagtggggaaggacaaagcgctggcagctgtgggcaggaggagggtgagggcagggtgggccggcaagtggggtacagcggggagtccagcaggaggtgtggccaccatgcaaggtgagcctcggtacggcgacctaggcagggaggatgtgggagggcctccgactggatggggacacaggtgacagccacagggcacctgctggctcccccagtctcacctctgtggcccttgctggaggacactggaaccagcagtgctgtatttcagcatctgtgcagatactctgtccctggaggctcttttgcttcatggactctgggtccttggaggatcctgcagagtttcccctccttgggagaagccccctcctcttcctcagcaacttgagcttgccctggtagtggggggaacaagaggaaggaggaactaagccagcttgtctccctgggtgcctggcttccccccgccccacagacctgcccctgatgtgttctctagaagtaaaacggagctacagaagctaaagccagtgttcacactttatgtgattagtattagtgtgatgttagcacaactatttcttcaactttatatgactttctgaatgctacttccttttactgttgctggactgtaatagtatatacctttttctcaagtgttcaaagaaacgaagcattctgaaagttgccagtctttaatttcttctttacctcttatttctttcccctaatcattcatgtttgccatacttctgaattctaaaagctgcattagtttttgagtgaattctcttgtaagcactgagtcgctgtgctgctgcctagcaatgtgtgggatctttctgagactgacaatggaagaggaagaaagcgcatttgctccatgaggccggaattgaggcatttaatgtgtgtgtccctgatgctcagcctcttggtttctttggatttgaaatgttaaaacctcaagaagtgacatttattaaaaacccacgaaaaactatgcatgatgacaaaatgctgacctgggacattttatgtattgtacttttcagttcagcctaatgtattattcaaaaactatgcatatttattcaaaaactactcataatgttggtggctgctgacctgctgcctaaacgtaggttattagtattcagattcaggagactaaagctacccaggaactgagacactcttgagaaccaggtagtttttgttagtggaaacgtgagctttgagggaggccgctttctcccgggagtgtgctggtggagagggaggcagctggggctgcactgtagagcccggactgcagtcagccagcctggctttgaatcctaactgcctccagtcgtggtgctggagcctcggtttcctcatttgtaaaacgggataattagacttcgcttgtgagattatgatcagttcggcttctttttagccgcttttccccattctgtagagtttgtctctggtgtatctggtgtgatttccttaatcacctcctcacagagtagatttcagggaccatttttgaaactacctgctttacattgccacctagatataagtacagcaccattttgtgcttatagcaggaatggcagcaagtcaaacgaccctggagctattttgcatcacgtggcacgttggttcgctgccgctgtgcagcacactgcgtctgtagctgcaaggcttctgggatcaggagtcctgcctggtgaggctcacgcagggctgtgatcaaggcgttggccagggctgtgcgatgaggattcgtttccatgcacactcatgaggctgctggcagcctcagaagatccatttccagggtcgctaatatcgctgttagaagacctcacatccctgctggctgttggccagagacatccattccttgtcacgtgggcggcttccttgggcagctcacagccaggcagtgacttccctgagagggagtgagggagagcatgagcgagacgaaagccatggtcttttgaaaacctcatcttggaagtgacatcctatctcttttgcacattctgtttgttagaagcgagtcgctaggtccagcctacaccccagtggagggactgcaggggcaggatgaccaggaggtggtgtcatgggggccatctcagagaccacctgtcactgtgcacctgctggtcccagagattcatgtccctcccatgtacaaaatacactccccgcaaggtccttccatgacagcatctgctcagagtcccgcgtcatcctctaaactggctctaggtgggctgagatgcagctcctggggtgcacggtaccccggtctattgacctgaactagagagacacgccgtcagctcatccaaccacagccacggtgccatcatggcaagcaccacaggccagaccttcctgttcaaaatgagggaaaatggaggcaggaaggagcctcagatgtgcctcacttccgagacccagcctggcagatggtggcagttcagaggcaggaaggagcctcaggtgggcctcacttccgagacccagcctggcagatggtggcagttccttgttcaagtgtcatgatttgggactgataactgtccctctgcccttggaggctttgattcctctctctgactcatgctttcctttgtttgaaacacagcagctgcttgcagttgagttgttttctcagcctgcttcctgctgataggatttccgggtccagcacccactttttattttgtactgcctctgacccttgtagttcaagctggcagtgatagttctaactttatgggcctcctgggagtctcactggtgtccattccatcaggcacgagccatacctggcatccctctgagatgagccctgctctgccttggggtcctgaagggtgaggactaatgcccataagcttctcagggcctggctattccatgagaggctgtgaggcccacccttcgtctctttacagaggctccagccatcttgttggtgctcagcacacagcaccattgtcttgatgtcacatgcacagcaggcttgccttggacagaagcggaaggaggagctggctggctggagcattgggggccgcctggcagtgggctgctcagaggagagtcagtggcaggaggtgcgatgacgatgacatgagtttagaggagggtgtggagacgaggagacggatgcaggtatcactccaccatggggagtgtgagtgtgggggcaaaggctgatttgggaagtcccgctcgataagcggcacagcctttccacccctgtttcatctaaatttctttagcataactggagttgaatatttgggctcctgtcctgccttgcttgtagacatgtggcaccctctgctcctcagtcaggcactggccttgatgacatttccttccttaaacacaaatagctgttggtctgctccggcaccgaagcctcaggatcactgcacagggcctggggaggcagtaactggtgcaggggaccgagcagggagcagagagtggtcccgggtgtctgagcccaccctctgtggcactctgcttctgtttgggtagggaatgtcctgggggacgctggtgggtgggaacaacacagctcttgccttgtgaacccggcaagtagcaacagccctcactggaggagctgggttgggctgggtagaggggtgatggggtgatggggtttggggtcagggagtgacggtggattccaggtgcttttttggaggcttcttcctagctcctcattttaggcaactaagcaatgtgccagggtgggttttcgtcagtttccgatgtttggtttccttctcatcacatcactctcttttctgagttggtgctgaccaagtttgttgttgatggatgtggggtttggagtgagcccatcgttcacacctcttaactgcctccccccacaagcttaggagctttatgggatgtgttgccgctggctgcttttctggtcctaggatacggcctttgccgacgtgttgccgccggctgcttttccggtcctgggatacggcctttgccgacgcaccttgctcttaggcagactgtcttggacatgagcccgcgcaccgctggggacaggccacgctgcggcagcgtgtgcacacggcatgaggtccgtctccaccaagccagcctggggtgggatgctgtgggtctgaagagaggaggccaggtagattttcgtaaaactaggagttatttattttattcatgattatgatggcctttatgtaaaacttcatcaaccctcttacttttacttttttagtacaaaaaagttctttttagaaaatgtagaaaacatgcacagaaataattgcattcagacacttgagaaagtcaagaatgtttcagtcaaataggttcttggcacccttccctcctcccctcactcggcaggcgtggatcgcgcacctgccctgggccgtgggtgtgccagcctcgaggcctcgtggcccctgctcgtgcctagaactgtgcctggcatggagagagcgctccccactgtgaagtgtgtggacagatggcagcctgtttccttgtgttagcagaactcctttaagtgccctggtgtttgggcgggagacgcgaaattctacactcagaaggtcctgcctgacaaacagtccttttaaaaagggtccttccttctttcttcccaaagttccaaaaagtctcttagaaagagcagggcatattttccttacctggtgtatttgggttccagccagactcaccaggatgactgggggcgcctgggcagaggaagcgtgcaggggcttaggaagcatggctggtgtttgtgcgattcttggagtggtgccttggtgagctgccccaggaccatgcggtcaggtgtgcgggcagctctgggcccaggggccgtgtgcacagtgcccgtccatctggtgctgctagggccctggccctgagctggttggggaattgcaggtctgcgtctgctgtgttcctcccaacgcctgcagcaccccaatttttggccagacagggccggtgcacttcaggaggtgaacagaaagaaacacatgtgacgatctcaacagccggcgttagtaagaggctgtgtcctcgacgcgagggattctgttcactgtcacaggactcagggcaggtttagatgtgaagcgtgttggctcggcgctcctcttgctgcaggcgggccgtggcactgaaatggcgaggcaccctccccgtttgcagattgtaagtcttggagcggggctagcgattcgtacttatttccgcgggcggctggggtgcgaggtgtatggggagaacagctggtctgtggtgctgcgtgctctgggtggcctgtgcagccctgtgatggtctccccaggccaccacctggctgcctaaggcccacgcacctgcaggctctgtgttcttaggtgtctggtggcagattctcatgcctttgtgtgagacttgtctttttcttctgaaagttttgtgggacttttttcatctccctgctcagggcttggtgggccctttgcattcgaagattcttgtctgcctttagctctgggaagcggctggcgccgttcagggctgggagccgctctgtcaggattgtgctgtcatctgttgcatcccgggttacctgtgccctcccaggccctttgttgaaggctgagaggtcttcctggaagggactgttttccttatgttgcagcctgagcctgcgtggagtcccagacgcggtcggcactcgcagcactgctgaatggcaggtgtccgctgaggggaaccgggcaggggaggagctgggacctgggaatggcaggtgtcctctgaggagagctgagcaggagaggagctgggactcgggaatggcaggtgtctgctgaggggaaccgtgttgaggaggagctgggactcgggaatggcaggtgtctgctgaggggaaccgtgttgaggaggagctgggactcgggaatggcaggtgtctgctgaggggaaccgtgttgaggaggagctgggactcgggaatggcaggtgtctgctgaggggaaccgtgttgaggaggagctgggactcgggaatggcaggtgtctgctgaggagaaccgggtgggagaggagctgggatccgggaatggcaggtgtccgctgaggggaaccgtgcaggggaggagctgggaccctggaatggcaggtgtccgctgaggggaaccgtgcaggggaggagctgggacccaggaatggcaggtgtccgctgaggggaaccgtgtgggggaggagctgggacccgggaaatggcaggtgtcctctgaggagagctgagcaggagaggagctggggcctgggaatggcaggtgtctgctgaggggaactgtgttgaggaggagctgggacctgggaatggcaggtgtccgctgaggggaaccgtgtgggggaggagctgggaccctggaatggcaggtgtccgctgaggggaaccgtgcaggggaggagctgggacctgggaatggcaggtgtcctctgaggagagctgagcaggagaggagctgggactcgggaatggcaggtgtctgctgaggggaaccgtgttgaggaggagctgggacttgggaatggcaggtgtctgctgagaactgggtgggagaggagctgggatccgggaatggcaggtgtccgctgaggggaaccgtgcaggggaggagctgggaccctggaatggcaggtgtccgctgaggggaaccgtgcaggggaggagctgggacccgggaatggcaggtgtccgctgaggggaaccgtgtgggggaggagctgggacccgggaaatggcaggtgtcctctgaggggaaccgtgtgggggaggagctgggacccgggaaatggcaggtgtcctctgaggagagctgagcaggagaggagctggggcctgggaatggcaggtgtctgctgaggggaactgtgttgaggaggagctgggacccgggaatggcaggtgtccgctgaggggaaccgtgtgggggaggagctgggacccgggaaatggcaggtgtcctctgaggggaaccgtgtcggggaggagctgggacccgggaaatggcaggtgtcctctgaggggaaccgggcgggagaggagctggggcctggaaggccaaggcaagggctgtctccagtccacgctgcaccccaagaagggaagtgtggagaggtattgactggtggctcagtaaaatggcctggaagtggccttggtgattccagaatctgccagctcactccctttggcaccgtgtcctgctgtgtccagggcgggcaggtccatgctgctctgggtccagggaaggtctgggaagagtggccagggacttggagggcctctcaggtgaatgatgggaggtggctggatgcagggatggccagtgcgggtctgcatggggcgggtatcagatcgtctggtgtgtgtgtccctgatgaggtgggaggggggtgccaggtgggtgttcggcagctgtgggcactgtgaggtggtggtggggggaggctgctgggacatgatgactatgggagggtgtgaggtgggcaggcgcctgcgggggcaggtcccaggtggagaaggtggcgtggtgtcttgctgtctcaggcccttcctctgtgcatccacgtaagtgtgggtaagccaagaatagcctgggttcaaatccacctttgccgttaattggctgtgtgctggtagacaagttacttagcttctctgtgcccccactccctcatctgcacgcgagaattgtaacagagccttcctcagagcgatgatggtgtttaggatgacatgcgctgcacagcaagtcctggccgtggcggctgccattgcagcccgtggggtcaccctggaggccgtgattgctgatgttgtgctgttcttgtgccttgctctcttcttctcggtgcccccagactctctctgccttcggaggacggcgtctctctcgcctcacactgtgtgcacgggcagtgcggacgggtgctggcttggtctttccagccctgcctcgctcggggcctgctgcatcgtagctcaggcctaggacccatctctgtacctgcaggtcttgggtgctgcccggcatgagtggaggagtttatcagaacaggaccttttataggaggttttaactttagaagggaatagaaaagtgtcatggcagcaatatttatttctagatcaccctgagttttttttctttgttttgttttattgtcctctttacaccatgagtttttaatgatgaatgagtgaaggagtgacagtgcgggttgagcatcccttatccagatgctccagaatcggaaaccctctgacaccgatgtggcacctcaggcatagctgagctagtgacacctttgctttctcatgggtcagtgtacacaaaccttgtttcatgcacaaaattatcaaaagtaccgcacaaaattaccctcaggctgtgtgtataaggtgtatatgaaacataaatgaatttcctgttcagacctgggtcctatccaaacatatctcattacgtatatacagatgttccgaatcagaaaaaatccacagcccttctggtcccaaaaatctcttctaagggacactcagcctgtgtgacgtggtcggtgactcctgatgggaggtggcagtgctgtgcggcgagtggggaccttcgtgtcacatcccatctgtgcctcagggcttggatgaattacttctggctggaccttgttcccttttccacacagtgaagaggctgggttaaatgatctccagtcaaggtgattcagagttagctggaaggtgtgtagggggaagttggagcttcctggccttgccccagacttactaagtcagagtccctgggaggtgcaggggcttgggagcaggcgttcttactggtagccccgatggtgtaatggaagttcagctggaatccagtaccccatggtcttctaaatttcactgtctgttctgctagctttactattaattgatacagttttaaaaaaaattaaactataagctgaacttatgtgattattttgggaggccaaggtgggaggattgcttgaggtcagaagtttgagactagtctgggcaacatagtgagacctcgtctacagaaaaattaaaacattagccaaggttcactgggtgtcttctccttggcccctttgcccacgtggtgaacactgtggacctgtgagggtgtgagggttgcgttcctgcgttctggactctttacccactactgagaagcagccgtttgaaatatgagttggcaaggaagatcagcatgtaggcttagaccaagacggtatgtgcagcctcctgagctaactgggcctgtgcttgagcccagtgatgagcagcctcagcaagaggaaccaccacctgaaagtcggggtcttacctggccaggagagagaggaagatcacggtgctgctgagattcttgtgcttgaccaggaagctgatctccgggagctgtctcaaagactgggatgaatgtggagatggtcctgatgtccggggaatattctgccgaaatcagagcaatttaaattgccagaaggaggtgaagggcaaccacaggttccaaggaagacaagctgaaacaatgcaaactggttttatattagatacgtgacttaaaatatctcaatacagttttctccaaaaaaaaaaaaatagttagccgagtatgggggtgtgcttggtatggcttgagcccaggagtgagtttgaggctgcaccgagcaatgactgtgccactgcactccagtctgggcaatggagtgagaccctgtctctaaaaaataaaaacaaagaaacgtgattatagataataagatattacttacatgagttacaaaccatttctttttaataagcagaggcccatgacagtaagagtctagtagaaaaattgggtggactgcatagaagacattgtccatcattatgtcacacagtgtgaggcggatggtgcgaataaactgggaagtcatgtctttcattgaggcagcatctattcctgtttggaagagaaagccgagaggtgttctgttccccgaggaagccatcaaggcttcatgacctgctgtcctggggctgttcacagtgatagctggcacttgccgggaacagcagcacctttgttgtgtgacagatgcttttctgagcgtgctttagtgagaccgtttcacgcatgtcctgctttccctctcccctcacccgtgacaaagtgattcccccttgtatttgtttcctggggttgctgaaagaaattactgcaaactggggggcttaagacaacacacattcattctcctgcgttttcgggggcctcgtgtctgcagtcagtgtgacctggctgatggcaggtgtggcagagctggttcctctggtgactttaagtctgcttccttcacctttccggcttctggaggtgaccgcctgcccgtctgcctgggctcgagacccatccttgaatccctgcagtctccgcatccttcctcatgtggccgtcccctctggctctgaccccaggctcacacaggcgcaccccacactctccccatctctagagccttcacgtggtcacgtggatgggaggagccatccaaaagcttgggagtgaggatgtgggtgtatcaggggccatcagccagcctgtcacacctcttaagaagatcgatccccagacgtgtttcttggccaacttttacatttatttatttattttttaatgatgatttttaataatttttaattattaaaaaattataaaataattttaattattttattttttaaattcattttttaatgattttaaatagttaaatgcccagtcctaatatttaaattattaatacagtactacttagatattgagtaatgtaatttatattcattttttactcttttccatcaaaacataattttactaagtacgcatgttctgtgtccgtgttttgtcatcactgaagccacttttggagtcacctagtaatagcctttccactctatctagttctgtagcttttatgtgtgtaaattacttcaaatctgtttatgatcctattgctggaaactttatcccaagacacaaaaatcttttctattagaagttattaactttaaaacaattatttattttattttattttattttttgagacagagtctcgctttgtcacccaggctggagtgcagtggcacgatctcggctcactgcaagctccacctcccgagttcatgccattctcctgcctcagcctcccgagtagctgggactacgggcgtccgccaccatgcccagctaattttttttgtatttttggtagagacaaggtttcaccgtgttagccaggatggtcttgatctcctgacctcgtggtccacctgcctcggcctcccaaagcgctgggattataggcgtgagccaccgcacctggcctaaaacaattatttctttaaaaaaacataccctctattctattttgtgtcttcacaacacaatcacttactgtattgctttttaaagtgatctttaaagagtcttgcagaagagactacacagcaggcccgagaccatcctgagaggcctgtgtgcaaggctggccccccgctggtgtcaggacggtgcccaccaccctcaatgaagaggggctccctgtgcttagctgcttgtgtggggaacaaggtttgtgctgagaaccttcctttcttctgggagtccagagtctgggcacgaagcaggcagagggtgcccatgtgcccagcccccagtaaaaaccctggcaccgagtctctagtgggcttccctggtgacgacactgcacatgcgttgtcacggctcactgtgtagggagttaagtgcgtcctgcgtgaccccgctgggagaggattctggaagctcaagcctggtttctttgggacatcgccccatggacctctgcccttgctgattttgtgtggaatcctttcgctgtaatgaatctcagctgtgagagcacctttgtgccaagtcctgggaatcctagggaatcactggcctgggggtgatccgcggaccactgacaagtttgttctcaatgacaaccaatacttttataccccctggaagaattgagttaatatgacatttctgcttttttaggtggtggtttttatctagcctgttgagtggcctctgcagtattgatcgaggttgtttcaggctaatacgttttcccccacacagtatattcaaaataaattaatgtgggagggtcatggaatattaggtgacccctctcctgagggaaaactctatgtcaggggatttatgatcaactaaggggttagactcagtgttctgcaggtgcctttgaacctgaagcctgtagcaggccttgcttctcacgcttggactctgccatcctgtgaaacgtgggtttgggtgtgtttcttctgtgtggagcccgagagtctgcctttcagacgggctgccagtccacggaccacactttgagtagcaaggggctctttccatccaaacagggtgtggaagcagtgctgggaagcagtcctgcatcctcacacccgtggcaggtgggcctggcaggaacttgtgtggtaacaaggtagcagttgtgggagacattttctactccgaaaggaagtttcttagcctgacttgaagatttattatctatagacacttagaggctctttctgtggtggtttttattatgaattatctttttgtgtttagctaataccagtgagtggtggagaaagatgggctctttaataatgagctgttcgtttttctttcttagggcactgtttgaagaagcaaacatggtagcatcaagcattccttgaaatatggctccaagggaacaatgagacgtgctcttggtcttggaagctcatcagaatgtttagagctggggaggcctccaaacgcccattgcctgggccgtcgcccccaagggtgcggagtgtggaggttgcccgggggagggccggctacggattcacgctttcgggacaggcaccctgtgtgctcagctgcgtcatgagagggagccctgcggatttcgtgggcctccgagctggagaccagatacttgctgtcaatgaaatcaacgtgaaaaaagcatctcatgaagatgtagtgaaattaattgggaagtgctctggtgtccttcacatggtgattgctgaaggcgtcggccgcttcgaatcctgttccagtgatgaagaagggggactctatgaaggaaaaggctggctgaagcccaagctggattctaaagcactaggtataaacagagcagagcgagtcgtggaggaaatgcagtctggtggaattttcaatatgatttttgaaaacccgagcctttgtgcgagcaattcagagcccttgaaattgaaacaaagatccctttcagagtcggccgcaactcgatttgatgttggacatgaaagtataaataatccaaatcccaacatgctttctaaggaggaaatatcaaaagttattcatgatgattcggttttcagcattggactagaaagtcatgacgattttgcattggatgcaagtattttaaacgtggcgatgatcgtgggctacttaggctccattgagcttccttccacgagctccaacctggagtccgacagcttgcaagccatccgcggctgcatgcggcgcctgcgggcagagcagaaaatccactcgctggtgaccatgaagatcatgcacgactgtgtgcagctgagcactgacaaggctggagtcgtggccgagtacccggccgagaagctggccttcagcgccgtgtgcccggacgaccggcgatttttcgggttggttaccatgcagacgaatgacgacgggagcctggcccaggaggaggagggcgccctgcggacttcctgccacgtgttcatggtggacccagacttgtttaatcacaagatccaccaaggcattgctcggcggtttgggtttgagtgcacggccgacccagacaccaatggctgtctggaattcccggcgtcctccctccccgtcctgcagttcatctctgtcctgtaccgagacatgggtgagctgattgagggcatgcgggcccgcgcctttctggacggggacgccgatgcccaccagaacaacagcaccagcagcaacagtgacagcggcattgggaacttccaccaggaggagaagagcaaccgggtccttgtggtggacctgggtgggagctcgagcagacacggccccggaggcagcgcgtgggacggtgtgggtgggaggggtgcccagccctggggtgctccctggactgggcccttctgtccggaccccgaagggagccccccatttgaggccgctcatcagactgacaggttctgggacctaaacaagcacctagggccagcctctcctgtggaggtgcccccagcttccttgaggagctcagtccccccttccaagaggggcaccgtgggtgctggctgtggtttcaaccagcgctggctcccggtccacgtgctccgggagtggcagtgcggacacaccagcgaccaggactcttacacagattccaccgatggctggtccagcatcaactgcggcacactgccccctcctatgagcaagatccccgcagaccgctacagggtggagggcagcttcgcgcagcccccgctgaatgccccgaagagggagtggtccaggaaggcctttggaatgcaaagcatttttggtccccatcgaaatgttcgaaagactaaggaagataaaaaggtaagcctgccaggagccactcagcgcggaggcccggcctcctcacttagcagtcacggggaggtgactcccagtcaccagcttgcacagtcctggcttcctcctgctggccctgtggcctctgtggccatcacagggtgtctgcgttgcctgtgggctgcggactgtgtcttgctgggacctcttgccccctgccctgttcgagtccttggttctggttctggctctgatggctggtcctgggcaggacatctgggcaggactggtggtggcgagagggaagttgttgtcttggagctcaggataaggcccttcctccccttcctgctcctccctagctctgtccctgtggctccttgaagcccattttaggtctgaccccagaatcttcatcccagtgtcccacacccctcttgaggcgagaatattcttgaagcactgaaagctggttcctcgtgctgtttcctccatggggaatatcctgttgtgtaaaacaccagctggactccgcagtgggcctggggagccccacgccgcctgctcactgaggggtacctcaaggtgtgtagtgctgccttgaagacctggacccatcagcatccctttgggggccctgcctttaggagctaagtttggagcaggaaagagtaaatgagcaaagctgggaaccctctggaagggactttgtccagcaggaggcggtgctgccagtgtgggagtgtgcggggctgtgcctgtgcggttgggtgcagggaaccctctggaaggacttcctccagccagaggcggcgctgccgtgtggggctgtgctgtgtttggagccagggcccttgtgacaggtgatgggggtgggcacttagctccctttgtttcagagaaactactccggctgtttacgatgtaaagacacctttttagtgtttgttcacatcctgagaccatcctaagaagaccctctaaggctgctggctgggtaggcagggccggggagtaggaaaggccgtgtttgatgaatatttctacttgattccccctcccctagtgttttccatgatgaaatgtagcacctgagagcatttaaaggcaaggaaggagccggctgccgtggcacacgcctgtaactgagtgctttggaggctgaggcaggaagctcgcttgagcccaggagttcaagactgccgtgagctgtgttgcagccactgcactctagcctgggtgacagagcgagactctggctctaaaataaaataaaatttaaaaaatggaggaagaacagatttctcgttttatctcctcaaaatgatcactgataacattttgatgtatgtaagcatagaatttttttttttaaaacacttgtaatcatatggattttcaacatcctctttatttttggggacagggtctggctctgttgtccaggctcaagtgcagtggctctatcatagctcactgcagcccctgctcctgggctcaagtgatcctcccacctcagcctcctgagtagctgggactactgagtagctgggactacaggcacttgctaccatgcctggctaatttttatattttttgtaaagatgggattttgccatcttgcccaggctggtcttgaattcctgagctcaagcgatccttctgcctcagcctcccagagtgctgggattacaggcatgagccacacgcgcctggcctcagcctccttagaggagtcgttctgcagctgcacgtgctgctgctgtctttccttgtctcttgatctgagccctggtctggattctcagggaggtgccctcctgcccgccctgggcctcacctcacttctccgtggagcctgtaggtggtggggcagggccactcccagggagctggcctcagtgtgggctgcctgtattgggcagggatgggaggtgaagggccctggaaagtggtgaaaatgttctttggaatcaggagattcctcatctctttgagtacatatttaaaactgtgttttctccactgctgtggtgtagtgaaggttgacactggtgtttatgtggttctttgtggattacagggcaccttcacctgctttctccttgaaattcaaagtgacctggacagtggggagtatgatgccattttagataattggcagtggtgcttatggtcctcagcggacctgagagacagataatgctgtcgtccccatcccaccagtgaatggactcctccttggggcgggtgacatgggggaataggtggggttgtgatgccagccttgggcttctttgcagtgaagatgagggtcctggctgttcccacccacactggagcagagcagaaggggagctagcatgtcctcagggttggaaataacggtgtggcggtcactgctttgcagagtgcatccttaccttgataggaatcctgaggccatcaggccaggcgattgaggtttggctgtcaggtgacttgctcacagtcacagggcatgtgagtgctgggaccaagacagccctggcgctccgtgtgggatttggagtggccttcataatgtggcgtgatacactatctaaaaataaacaggtagtaacgtgttgtgttttatgggttcctgctgtaatctcttgaggtttaagtgttgctgtttactttgccaagtgggcctccctgtgtagttaggtgagtctgatcccatagcctccccagttagagcagcagaagcttccaggggtcatgaggcggccacaagatgggtccggacgtcgccgtggacaggtctgcagagtttcgaaggtggccgtgaccgtccgcagcgatcagggccccacctggacgctggcctgtgctgagagaaggggccagcagggatgcaggaagtgcctggaagttagaagaagcagcagagttggcacagggagggagagagcagaggaggcccctggagggtgccatggtgtcaggcagcgagcttcacgtgactccggattcttagtgacggggacttcagggctttactttgcacaaactcaggtggaatcagtcaggatccagccaggagacaggaaacgcagcagtaatttgaacaggaaaaattcagtatacagaatcgttaacaaaggaaaagaaggttagctgctgaaagagaaaagaaaggctaaggtcatcagtgtggaaaggggctgagtctagaaaagtgggcgtgggaggcttagatacccagagtaggggccttatctgacaggactgtgagtccatcgcagctgtgagagagtgaagcagctccaggtgaggattggtggctgtccccagtccccaggaaaaacgatgtgggaccctcacatgccagtccaccccactccatctgggaggcagtgcctgtgcccattgctgaacattgagcccctgggcaggagccatgtggtcttcaaggcccagtgccaggatcagaagctgggcacggcagggtgggtttggcgctgagaagaaatgccttggtgtctggcacagtgccccgttaggctacccagcgtctgtatgcacccttcttcagcacccccaagggcatctcactcccagcttctgcttttgagtccgccttggcttgcctgcaccccagggcagggttttctgtggctgtggagcagctccggcctggacagccacgtcagctcctccccccagtggactgcaggcatgtggtgtccagcgcgctctgaggcccaggcctgggcaggggcccctgctgacggtgtccttggcttaggcactcgcccttagccctagaacaatcttcagcattccctctacacagttattactagttctatgaatgttaaacgttccctttgaaattactggcaccagcctttcttaatctgtatgcaaaataagctgactattagaagaaatataatactgcatctagtcacaagttggtctctaaggccaatagttctgtgtcctaactgccaccagattctccattgttgtcctttgccaacgcttttgtcactgccgcctccatcctgctgtctgcaggctcagcccgggtttccgccctcagtggccacttgctcctgtgaaagcctggggaccagcgagccagaccccttgttgctcggcatttctacgtctccttggtgagatggaaagctctaaccccctgcacaccgagccacgtggtgaccttgtgccagctcatccttgtcagcttctccctcctctggggaggagcaaggaaggggagctgagttacttgtagactcgctgagggtctgaaattcttgaagtgggtgagatgatgtttggaagtggactgctttcccttttgtgtagtttgctctttgtctctgcctaatgtctgtagccagcacaagctggttctcatggagataagcattcaggcctgtgactaacaaaaggggctgatgtgaaagagaacccaggatctcgaaatgcttctgtcatcaaaaatgattgccttgtgtttcatttaaggcaagcgtgtttaattctgtgtctctgcaaactgactcaaagttatattaattaattaaattaattaattaaaatacctggttaagtagcagcacccaaattcttaaaatttccatacaatggattttggaaattttaaaaatgaaaatatgttatttgtgatatgtaaaggattgattggtgtaattttgaaatgaatgaatacatatttttaaattcctcagtttaatttctggtatgagaaacatcagtagctgaaacccacaaaaataaagactcgctgaggtgctcagtcgtttgtaggtactcccaggagtcctgagaccacagcacttgaggactgctgcccgcagaaggttggatttgcaggagtgagttccttctcaactgttgcttactgagataagaccattaacagagaatggagaaataccttatgggtgtactggagtacccgagagctacatctgagtgagatagtggtacctgcatcacctgaagtacatctgaaaatcgcgctcataaaaaaggcaaaatacagaagcctcaagcccgtgagcagcgcagtctgctgtccagggtggcgcgtgcccctcggtgggaggacaagccaggggcgagcgggaggacgagcaagcaccaggctggggggcctctcccgggaggggtgccgtggcgcctcgctcgtgttggtgcagttttatttcttgcggtgcagtgtgttggtgggtgctcatcatctcattctccaccatttgttcatgacgacatacccaaaggtacaatcacagacacaatgcgaacagcactgtaagagtcagagccttagatgctgctgctgcctctgccccgctccgcgcggggagctgcagttcagagttcgcttcctttcatggacttactctgtttgcacaggctcttggatattctcttccttttccttccctttattgaaaatacatgtgacatactgctgtgagttacttttttctaaaacaaatttctcatgtacatagttatatatcaattttaaaaactcttcttcattgtagtggccacgtggtattatgtcatatgcctgtgccatttcttactgaatcagtccccagttgatggcaaccttagactgtttctatatttaataataagctggattgcagtaaaaattcttaaagttctatctttgtatatatgtgagttttcttttgggtaggttcctagatgtggaattgctgtttttaaaagtgtatgtgcattttaaagtttgccaaattgctcaccaaagaggttttctagtttatatttttgtcagtagtgtgtgtgtgtgtgtgtgtgtgagagagagagagagagagagagagagagagagagaatgcccccttttttattgaaggagaatttgtgttattttgatgtacagaaaactcaacagtgttcatttcacccagtttattggcaggttctgtggcctttgccttttccagcttggcaacgtgagccacagattttggtcccagagctagctttcccagcgatggcagatcttgtcatatctgttgtcgtgggtcttgatagcttccaccagcttagagctcccttgtcttccaagttaacctgtgtgaaggcgacagtggagcagactcgttggtcctgcgggcttgacgccctcgtcaggccttcccttgacagtgcggtcgggaacccccatctcaggacgcaggcaggcaggaagacaaccagctcagtgggagccacgtcacgtgcgatcaccacccgctgagccttctcgttctccaccaaggttgtgacagtatcaacccctgctggaaggacaagtggtccatctcttagtggggatgtcccctgtgccagtgctgtcttttagtccaggccaacagtctctgcttcttctcttgcttgtctctggttggtactgtgggccagcgtacgccattgggtagctgcctgtggcctgaggcctgggtgaaccagtcaatcacaggaggtgctttcagccattcatggaggatggccctttgccactgcagcctgatacagcagggcccttgacaaagtgggcaaggtccctgtaatggctggacgtcctgtccactgcagaaattcttagggctttcctcagacgtccatcttcttggccatctgctgctgcatggtggcaggggccagggcctcctccttccctttggccttcttccctttcagcatcttaggtagctggagaagaggcccttttcttcctacccatgtagctctggagttttatcagtgttttatttatttgccaatatgagaggaaagaaatagtgttatttaatttcttaaattgagcaattttgtatcttaatagaccataaatatttctcttattgtctactcctgattcatgtaccttggccatttttctacctgattgtaggcctttttcttattgattagtaagagctctttgtatgtaaaagaaattagtgctttggtcaaaatattttaaactagttataaaaaaatctgccaaaggggaaaaattgaaaatgaatgaatttttggtagctggaggtcaaatagagagtgggaattttcttgggaggagttttctgaaaggtgatttatgcatgcttggagggtaaaggataggattccttggttcaggaatgcggcttaagttttattttgatttgtttgatatgaaccttggcataaaatcaattagtaaatttggttacttttataatttattatatagattaaaagctacataatagggatatgctatggtttgattgtttgtcctctctgaaactcatgttgaaatgtaatccccaatgtgacagtattaagaggtgaggcctttaagaggtgattaggtcatgaggactcagccctcatgaatggcagaatccataatccattcatccttgatagcttgtcacaggagtggattagttatcaaaagggtgggtctgaataacgagcagtgagattgaatcagtaacaaaaacatctcctaacaaagaaaagtccagggcaagatagattcacagccgaattctaccaaacctatgaagaactagtaccaaccctcctgaaacggttccagaaaatggaggatgagggatttcttcctgactcattttatgaggccagtatcaccccagtacccaaatcagacaaggacacaacaccaaaaatacagaccaatatccctattgaacatagattacaaatcctcaacaaaatactagcaaactgactcaagcagcacatcaaaaagataatacgctatgatgtgttatgtgccagggatgcaaggatggttcaacatatgcaaatcaataaatgtgatatatcccataaatagaattaggaacaaaaccatatgaccatctcaatagacatagaaaaagcagttggtaaaattcagcatgataaaaaccctcaacaaacaaaatatagaaggaatatagctcaaaatagtaaaggccatctatgacaaacccacagccaacatcataccaaaaggggaaaagttgaaagcattccctctaagaactggaacaagacaagaatgcccactctcatcactcctattcaacatagtactggaagtcctagccagagcagtcaggcaagaggaataaataaaaggcataccaattagagaagaggaggtcaaattatcgtggtttgctgatgacataatctttttttttgagacaaagtctcgctctgtcacccaggctggagcacagtgctgctatcctaggtcactgtaacctcaaactcttggactcaagggatcctcccgcctcagcctcccaagtagctagaactacaggtgcatactaccatgcctggctaatttttaaatttttttgtagaggtggagtctcacagtgtagcccaggctggtctcaaacttctggctcaagcaatctgcctgcctcggctatccaaagtgctgggaagtgtgagccaccgcccctggctagatgtgatcttatatctagaaaaacctaaagacttgactgaaaaacttagattggttaaacaaattcagcaaagttgcaggatacaaaatcaatgtataaaaatcagtagtatttctttataccaataatgatctagctgagaaagaaatcaaggaagcaatcccatttacaataactacaaaaataaaatacctaggtatcaattgaaccaaggaagtgaaagatttccacaaggaaaactacaaaatactgatgagagaaattgcagatgacacaaaccaatggaaaaacatccatattcatggattggaataattaatatcattaaagtgaccatactgtctgaagcaatctacatattcaatgtaatccctaccaaaatacctacgtaatttttcacggaagtagaaaacgcaatcctaaaatttatatggaaccaaaaaagagcctgaatagccaaagcaattctaagcaaaaagaacaaagctggagatattacattacctgacttcaaattatacaaggctgtagtaaccaaaatagcatgttactggtataaaactagacaacaaaatagagaacccagaattaaagccacatatttacagccaagtgatctttgacaaagttaacgagagcatacaatggggaaaagacatccttttcaataaatggtactgggaaaattggattgccctgtgtagaagaatgaaactggactgctatctctcaccatacacaaaatcaactcaagctggattaaagacttaaacctgaaactataaaaatactagaagaaaacctagggaaactcttttggatgttggtctaggcaaataatttattgttgaattctcagaagtacagacaacaaaaacaaaattggacaagtgggacttaaagaacttctgcacagcaaaagaaataatcaacagagtgaacagatagcctgcaggatggaagaaagtatttccaaaatatgcacctgacaagggtctaatatccagaatatatgagcactcaaacaactcacagcaacaaaataacgccattaaaaagtgggcaaaggatacgaatagacatttttcaaaagaagatatacaaacgttcaacaggcatgtgagaaaatgcccaatatcactaatcatgagagaagtgcaaattaaaaccacagtcagatatcatcttacctcactcaaacaataacagatgttgtcaagggaactcttatacactgtagttgggaaggtaaattagtacaacctccatggaaaacagtatgtagatttttcagagtcctaaaaatagagctaccatttgagccagcaatcctactactgggtatctgtctacccataggaaaagaaatcattatatcaaaaagatacctgcactcttctgtttattgcagcactatccacagtagcaaaggtatggaatcaacctaagtgtccatcggtggatgaatggataaaggaaacatggcatctatacccaatggaatactattcagccatcaaaagaatgaaatcttgtctttcacagccacatggatggaattggaagctactgtcctaagtgaaacaagtcagatacagaaagacaaatcccacatgttcacatttataagcgggagctaaatgatgtgtacacatggatggagagagtggaatggtagagaatggagacttggaaaggtgaggggtgggaggaggggtgagtgatgagacacttctgaatgggtgcaacgtatgttgcacagactgtgcatagactgcacagacttcagcactgtgcagtctatgcatgtatagtaacaaaattgcacttgtactccatacgtttaaacaaatacattttcatcgtatctaagaaaactagagagtgggtctgtgaagagccagtttagctccctcaacatgcgatgccctgtgctacctcaggactctgtagagtccccgccagcacgtaggccctcaccaggtgcagtcccttgacctccaggacggtgatgaatacatttctctttttaaaaaataaatgacctagtctcaggtattcagttatagcaacaggaaatggactacgactatatatacatacacacagtagggatagagagatacaggtatagatatagtagttttgcagttaggtagtaatgcagatggtagtgagatttctcttactctagggttctacgcaaagtcagccggagctgtgttgggagtgttggtttataattttctcctgtaaacttagaaaacttttgacctggctgccctggttcttcaaactacatgcgactgtgtcctaaaggaagcaaagtcatggggtgtgtgggcagctctgtgagcagagtggccatctgggatctgttacctggcctgacttttcctcccccttgtctactaaccatgtccagtctggatgggaggtcacagggtcacctttaactccaaggggaagttgtcaggccaagaggctcagctgttggattccaggttggagagctgagggttccgatgaaaggcacaaagaccgagctgcacactgcgagcatcagtacttcctttcctaccctccctgtgagaaatgcctgagctgtgggtcaagaagaggagaattggagagcaccagggggtcaggtgggtgggaggagccttcacattccactttgagttccatggtggccccgatggaagctgccctcatgtttgggacccaggagtgcaagagatctgttttctttggtgtgtttagaacttggagggggactgccccatagaaggtgggagtggggtcagggcaagggatgactctgagtggcatgagaagttcctctgggctcctgggggtcacagagcttgagagagtgtgttgcacaggacagtaaatgtgctcatgggcctgcacccaggccaggcagtgggagaaggagatgagcacaggaccaaaccaagtgacacctgagaggctggtggccttaccctgtgatgttgaagcaacagttacacaaacgtcccctcatacactgaaactgcagggaggggaacagtgcggcgcacccgagagggcttgagtgtgatgcgactgaagcactaaagagcagaattgatggaaaagttaatttgactgtttacttagaaatgactgaattaaatctgtatcaggtgtaattttggcttagagttagaaaatcagattgggttatataaaataaaggtacattttaaagttaaatgtcttacaaacctgagtccatgagtgcaaaatttcagtctattacgtttagttgaggaaggagtaagagaaggaattcctttgcctttttaaaacaaattttccctttaagagaacacagtgataaaactgttaggtgcagcttttgggagtcactgatcttattgcatatcaagcttcctaataatttctaggacacatgtaatcgtgaggctttatagaagcagagagaagctgtctgccaagtacaccgcctggttctttcttgctgtgtgaggatgtgctctggcccagatttcacatgggaggtctctaagcaaatgcacctgcttacatcagtcacatggaggaagctgttgaccatgaagtatctccattttgtactctgagagctgcatagtttatatggcatttttcagggatccatactccataactcctaggattccaagtttatttactgtgagcaatcctagacacaccaagtacatcccgctgaaggcattccacagataaggattctcctgctagcaaatatccttgggtttgccaggaggtctttcattagcaagtttacagggagatttgattaggtcacctttcttgtctggggtaaccccagttaaagtgagagaatggactacaggctcctcctccttgccttcttccttcactcagggagagaagatacctgtactagaagggcgtgaagaattgtgatccaggatcttattggcagcctgttcgcaacaacagcacctagaacagtgcctggcagttagaaggcacttaatattttttttgattgaatgaaattgtctgttgacaatggagtaaaaaaaatgtagtatttccatactatgggatccatacactcattttaaagtaatacgagtttctatgctataacagcacaaattaaaataatagtggtttagataaagaagtatagtttgagtaaaccctccagagctggtgtggaggctccaccctcctcaggaacccagggtgcctactgttgtgtggttgctgctctccacatgtggcttttgccctgaactttgagatcgctcctttagcttcacttccccatttccttcagcaggaagagggaggtggaggcacagtctggaagttgcacacatctcattggacagacttagtcatgtagctttgcctagtgcaaagggctgggagatgtagtccttagctggacagccgtgtgtctagctaagatttctattcctgtggaagaaggggagactggttcttgcaggaatggcgagcagcctgtcacgcaaagcggatcaatacattactgataggaaaagctcccaagggcatatcgagtggaaaatgcaagtcacaaaaacacatatatttaatatcctgttttggtgtaaaaaattctaacacccctcaaagaaacctatacattttaaagtgcacatatgtttatatgtaaatatatggaaagaatacaaaggaaacactccaaatgggtaatagtagttatctcagaggtagtaaatgaaaactgggaagaatccagggaatttttatcttgtgttgtttcaacttcttatgatgggaatatgaacatatttactaaaaaaaaacttcctttgaaggaaaagtaaaaattatttaaaaaattattttaataagaacaaagtcggtgagagatggccttggaaacaaactgtacttacatggtgtagccaatgacaggctccttggattgcaggccaggagagtttcaggttcagcacatagattttacgctgcttttccagtacaatgagaggaagtttcaaaatagattgtaaaaaaaaaaaaagtgtggataattctaaaagggtcacagctcaggccccatgatgtaagtctctctgggaagggtggcgttggccatcacgctgtgtaaacagggatcccgggggccagcatcgcactgctctccatccccagcgaaaggaagggaggcagacactgggcagcggcactcggagtccacccagtcctgggaaggaacggcggctccagggagaggagcctcatgggcctgcggcagagctggggacctggggctttgtgccacctgcaccaggtgacctttcctagtccctgcagcgtttgcccatgggtttcatcctgaccacggccaccgagtgcgctctctggggaatggtatcgcagtgaggacagcttcaggcctgtggaggggctgggaagcagtggacagaagcccccaccgtcctggaatagggcaggggctccctgagaagctgggatcactaggacagatggcttgggggccatggaggtagaggatccctgagcaaaggggcagagaccagtgtggccccttcactgttggctcgtgttctatggggtttccaggaaagtgagactgttcagggcaaggtggccgccacatccctgcagaaccggaagtgtcttaagagttggaatcggtggcggtgtattgattcgttttgctgctgcttcagttttatagaaatggcttaataacacagttgtctgcaacttgtttttaatcacttcatgttatttcagtggtttatccatgatgttattggtagtcacagtctgttcattttaacactgtataatccattgtgtgaatctactgctacatacacagagccactaaagaattactcataacgcactagtgagcattcttgtacctgtctccaggtaggcttgccagacttttaaatcttttgctaatctgggagctgtaaagtggtgtctcatgtggctttgatttgcattcccttgcttataaggctctgcgtttcctctctgttgaggcgcctactcaaaccttttggtccctctctcctcttgggctgtcttttcctcatggactgcgggaatgatagacgctggctgttagtccctggctggttgtgcacttcgcacgtgtccctgccccgggcatgactcctgttttcactcttctagccagatgtataatcttttctcctatggtttacactttgtgtcttttatatatgtatatttttgagatggagtctcactttgtcacccaggctggagtgcagtggtgcgatctcggctcactgcaacctccgcctccctgggttcaagcgattctgctgcctcagcctcccgagtagctgggattacgggcacatgccaccacacctggctaatttttatatttttagtagagacagggtttcaccatgttggtcaggctggtctcaaactctttttttttttttttttgagacggagtctcaccgtctcccaggctggagtgcagtggcgcgatctcggctcactgcaggctccgtcccccagggttcacgccattctcctgcctcagcctcccgcgtagctgggattacaggcgcctgccaccttgcccggctaattttttgtatttttagtagagacggggtttcaccgtgttacccaggatggtctcgatctcctgacctcgtgatccacccgcctcggcctcccaaagtgctgggattacaggcgtgagctaccgtgcccggcctggtctcaaactcttgacctcaagtgatcctctcccgccttggcctcccaaagtgccgggattacaggcgtgagccactgcacccggtctgtgtcttatttaatacatttattactacttgaggtcaaaacagattttctccctttttccccttaaagtttcttggagttaatgtttatgaaaagaatcaggtgagacgaaagttaacttttttctctgtgggtaaccagtggttctagcactaatctcgtccttccacgtggatcagcagtgctccctctgtcatggatcatgtgttcatgtgcgtgtgggtctgtttcttagttctgtgttccttcctagtcagtatccccacctatactttaaaaaattactatagctttataatacgtctttctgtcttctagggcaggttttcttgtctgtgcttgggcctcgctgttttatgtagattctacaaccagtttacaaattccccgaaatgctattgatattttgtgttttaatctgtagctcagtttgagggaattgatatctttaggagatcaagccttcctatccatgaaaatagtatctctcttctctctcattttggcttatttcagtaaaactttgtaatttccttcataaacatctttaattaaatttattctctagctagatttatttcttggtaccttataattttatttgccattataaatggtaccttttaaaaattgtaaatgcttcaacctgaggaagctggttgaaaaaggaattaaaatagaataaattatgcatgccagctcttatgatatgtggaagtataattgactagttgctttttatatctagctaccctattaaggttaagagagttcacttcgttactacttgttaatatttgttttcatgaataggtgttaaattttagctgttttctttgttattttgcattcattgagatcatgtttctgccttttgatgctaacatggcaaattacaatgattgattttcaaataatagaccatacttgcattcctgagataaacctaacttatgatcattttttatacactgatgtatttggtttgctactatttttgtataattttaaagtctgtgtttgagtgagactatctcgtactttcccttctcattatctttgtcgagttttggtatcaagattactgtagtctcacaaaacaaaaaattaatggtagaacttttctattcctcttccttctcttttccctccctttcttctccttttcctcgtatattgaatcttatattttatttttatcctccctccagaggatttcaataactttttatttaaaaattttaaaattagggataaagcctgttttgtctattattaatctggtgaaagcagccttttctgagtcagcactcgtctttttatttaaacttttccatttctgttttcgaattgttactataagtggcagattgttctgacagctcaagaagaagatcaggcagatgcgggtcactgatgtgttgggtgactggcacattgagtcttggctctgggatattactgcattcttcctgtgaatccactttttctaggttctccctccctgctttcttgccttatgttttgttttgttttgatttcaagcctggttggtttatttccttagtccacacccacctcctttaccggtgaagaaattatgtgctttgtttctgtcgttaaaggttctagtcctagtcaattgcttgggacatcataggccctaagatattttggaataatttaaattaatatctctacttaaatgtcttttcatgtgtaatattcatctttttctttcttgaataggacacccagtctttgtgcacatttttctccttcctttcacaaaacgtgctttgctatgacccagaaacctttctttggttccttacacgttactctgtaaccattgctgtaagtttgtctagttttatgtttgaaatggaattttgttgattctaaaatagttttgcttttgggcttggaattcttcctgccgcacagagttttgtaacagatttaaccaggtgtgccggttactcagcttactgccctcagccctaagcccaccctctatgacaccgacagggtctccgcatcaccttcctgctcacagctgcatccctgtcaggctctgtccccaggggcgctccccggagctggcaaggcaggagtgtcaccatagcaacgtttcaccctcacaggggcagttccttcccctctcagtttgcagtttgcccagctcattgcgccaaccttctggcccctcagaaacaatggatgggctgggtgccatggctcacacctgtaatccgagcatattgggaggccaggaattggaggttacagtgaactatgatcgtacccctgcgctccagcctgggagatagaatgagactcccaactctaaaaattcgaaaaaaactgggccgggcgtggtggctcatacctgtaatcccagcactttgggaggccaaggcaggccgatcatttgaggtcaggagttcgagaccagcctggccaacatagtgaaaccccgtctctactaaaaatacaaaaaaattatccgggcatggtggtgcgtgcctgtagtccccgctacttgggagactgaggcaggagaattgcttgaatctgggaggtggaggttgcagtgagcccagatcgcaccactggactccagcctgggtgacagagtgaaacgctgtctcaacaaacaagcaggcaaacaaacaaacaaacaaaacccaagggctggagccccatgtcctgtccctcggtggtctgggccccagctccaccggctgttttcctgtgagctgccaagttggagtaattccttctgcttccctgcattttcccagccctggggtggcagcggcttcccgaggttgctactccatggcatctcagagtccctctgcctttccatccctcaataccaagctaccccttctctacatagtactctctgttagaactacgggtggtttctgtctcctgagtgaaccctgaagaatatagcaggagatgcgaagatgtgagctagaaatctgactcctcgtaagtctctatattgcctctttttggaaataccttcggatgatctggtctctcttttaagctacatactctcttgtgtacagtctatttgttcagtaagtattcattgagtacttggtatgcaccaagcactgtgggaggggtgggggtgtagtcgtgaccaggacatggtccttgccccactggggcttagggactagtgtttatttagaccgaattggttaggaatttttagttctagcagtgtgggtaacgaaagaaaaaaatacataaattgcattacatcaaatgtaaaaactctacacattaaaaaacgcaacccacagaatgaaggcaacccacagaatgggagaaaacatttgcaagccatgtatctgatatgcagttaatatgcagagtctatagagaactcctataactcagcaacaggaacaaacaacccagttaaaaaatgggcaaaagtccagtgtgaattctgtgaagtagaaaagaaaataaagagaaattaaaataaaaaaaaatgggcaaagatccagtgtgaaactgtgaagtagaaaaaaaaatgaagaaaaagaaaaattaaaaaatgagcaaaggacttgaatagacgtttctccaaagaagatacacaagtagtcaatgggcacgtggaaagatgcccaacatcatcaattattaggccagcgccaactaaacacacagtgagtcagcaccttacactccttgggatggctactataaaacaactgccaccaccatcacaagagagaaaaatgacccgtgttgggcaggatgcggaggagttggagtcctggcgcactgctgggaatgccaagtgccgcacccaccatgggaaacagtgtggtggctcctcaaaaaaccaacagtacaatgaccacatggcccacagtcctacttctacgtatatacccaaagaattgaaatcaaggtcttgaggagatgctctttatacacatgttcatagcagtattatttgcaatagctgaaaggcagaagccacccagatgtccatcatcaggtgacggataaacacagtgtggtccatccataccgcggaatattattcagccttgaagaggaaggctacaacatggatgacccttgaggacaccatgctcagcaaaatcagccagtcacagaaggacacacactatctaattccacttatgtgggattcctagagcagtcaaattcataaagacagaaagcgggagagggggcctgggggaggggaatggagagtgcgtgttaaatgggggcagagcttcgttctgggaagatgaaaaattctggaggacggtggtgatgcttgcataacagtacgaacacacctaatgctactgagccagctaacttggtaaattttgtgttatctggattttaaaatcagattgaataaatattttgaaagtttaataaaaaacggcagtgcagtagtacagcaggagctgggtgttgtctcaggtcagccatgagctgtgtgaccttgcacggacttgcttccctgacttcccagttctcatctgtggattgaggcgttggaatggttcttacgccaaaatgattctttgctccgaactgatggtcgcatgggatgattcactgttttgttttagacagagttttgctcttgttgctcaggctggagtgcagtggtgtgaactcagctcacggcaacctctgcctcccaggttcaagcgattctcctgcctcagccttctgagtagctgggattacaggcatgtgccaccatgcctggctaattttgtatttttagtagagacagggtttctccatgttggtcaggctggtctcaaactcccaacctcaggtggtccacccgcctcggcctcccaaagagttgggattacaggcgtgagccactgtgcccagcaattcattgttggcactgagagtggccaagaaatttggtacctgagcaggggttaaggttctacccttcccctcccctcatttctagcggttttactttggagggaacccgatgcttttctgggcctgtgtgtggtagtaatgccggttgaccggccgtcccttgggaccctgtagccaggcaggttgattggcctgaggcccttggttctccctgaagccggctggctcaggctggctcactgcatcctggatgcctgggggccagggtgaccggcctctgtggttggcgggcgggcggtgtctgctccactcagtgcccttgagtgctgggtgtggtggccgaaggctgggaggtggagatggtgccctgggggccacctgtcttctcagacagtcgtgaggagtcttctcaacttaaaagctggagtttgaaccaagtggtcttttaggccatttttattgttgttttccctgtttagtactctttggggaagagtcaagattatgtcacaccagcaggggtgctaaatcggcggtgatgatctgaatttattaatttacaaaactttgtcaatttgagaaacacgagtaaacgctggtctctccctgctgtggaagttgtcacatctgttactggccctcgttccatgagttgatttagtgctttgcaagaattgttttctgtctgcttgttagacttttcctttctcctttacatctccaaagtgcacagtgcatccacgtgtgggcaggcgtcagacatcctttcttttgcctgtgctgggaacaagttgcaaggctgactgtggaagggccgctcacctggggcgtggtcagggctgccaggtgtggtggctcacacctgtaatctcagcactttgggatgctgaggtaagtgattgcttgagcccaggagtttcagctcagcctgggcaacatagcaagacccagtctctacaaaaaatacaaacattagccgggcctgttggcacatgcctgtggtcccagctactcaggaggctgaggtgggaggatcacttgagcctgggaggtcgcggctgctgtgagccatgatcatacctctccctccggcctgggcgacagagtgagatcctgtctcaaaagaaaaaaaaaattaaactctcttatcactgtccatctaaataacagagagaggctctctgaaagaaatgatgtttatctgggagcagggcattggagtaggcagatacttgccatggtctacagtgcatagctggggaggccaaagaagacaaaggcttttaaaggaaaaatgaggatcacatgattgttttgagataattatccttgccacaaggatcagcaccaaggatgataccaggctggaggtgggcgggcggttgctgggcagatgtcctcacagtgtgttttgagtgaggctgtgatggcctgtgtgcatggctgtgatttgcacatctttgtgatggatttgtttttcgcaggcacactaatgtgtgagccctcccttcatggccctccccagctctgtttgttagggtttttaacacaagtgattcattttgattctgacagccttaatctcacaaagccatgggttcattccccacccttctcaagagcagaaaatacagaatagcaaatctataatgagaacaaagtcactcattgctttagcagtggactgaacatttcccgttattgctgttgccgcaacacacgtctgcatgccgtacaggtgccctgcgctccccattgttgggcagtcagtcccccgtgttgtggcctccgtgtcgtgtgtctcatgagcactgcccagcgccttctcaggcctcccctctgccggggccgcacacctgccaggagccgggcgctgtgctgggcagcaagttttcagacagcatcagacgaagcgaagggcgctgctgctgtcgtcccatggcagtcccctgggggagattcctcatggctgacagcggtgtcactggtgggaaggaaaagacccaaagactgggagagaggacgctggggagtcttaacttagacgggggcttaaaggtctcttacaagaggggttgtttgggttgaggggtcaggggagggaagaacatgcacaaaggccatgaggcgggcgcccggggtgtggacccagagcgtggacacggacgccagcctaagcaggagggagcgggggtggcaatttatcagtcaccacagaagagcacgctggcaggacactcaaggtgcctgccatcaggagcagagacaccaggaagccacatctgtgtcctaatgggaccacaggttccctccaaagagtgtcttacaggctgatttacagaaggcaggagctggcgggagcctgagctgagccccatgggagcagcaggcaggtgcaggcaggtgcaggccggtgcaggccagtgcagtccgttctccagcctcggaggcacggcgtgcacgggggcctgctccttagtttgaaaacaagcagttgtgccactagtgccttggagtgagctggcaactgtggcgcctcagcttggagtgtgcttgacacctgtgttggccggtccatctggcacctggccgctgtgcttctaggcctctgcctgccggctgccctctgctgggcatcgccactttcaggatgacagccttagagccttctctcggcctggtgggggcccagtggtggcgtccctccccgagcatcctctcgtgttcccggcagccacagcccctgggtgctggacctctcacctgccaagaggatagtgacacccctctgcccgtctttaggggctgtgggcggaggggagggtggagagatgggggtgtgggcagggacaagggtcgagagatgggggtgtgtgcggtggggaggggacaagggtggagagatgggggtatggggggaggggacaagggtagagagatggggtatggggggagggagggtggagagatgggggtatgggggaggaggggacaagggtggagagatgggggtacggggggagggagggtggagagatggtgtgggcggaggggagggtggagagatgggggtatgtggggaggggacaagggtgtagagatgggggtgcggggggagggagggtggagagatgggggtatggcggggaggggacaagggtggagagatgggggtgtggggggagggagggtggagagatgggggtgtgggcggaggggagggtggagagatgagggtgtggggaggggacaagggtggagagatggtgtggggggagggagggtggagagatgggggtgtggggggaggggagatgggggtgtggggagggagggtggagagatgggggtgtgggcggaggggagggtggagagatgagggtgtggggaggggacaagggtggagagatggtgtggggggagggagggtggagagatgggggtgtggacagaagggagggtggaggatggaggtgtgggcggagggtaggggctgcagaggccccggggtgtggggtggtgtggggctgggccgtgacaatgggtggggtaggaaggacttttcagttgaggaggagcagcgcagtgcagggagacccaggcgggaatgggtctgaggacatgatggggtgtgtcagcgtggtggtcaaggagaggggagaggcgggagggtggcctgctccatctgcttccagaaaggtgcaggcatgctgtaggtttccctagggactctcaaggaattgtggcaaggttttctacaagactcttatgcaggtggagagacaaaagtagctgcagagcctcaaaatcttgacataaacaggttcccttccttcaagcctgaaattggtcacttaggattccaagtcctcaggaaagcagagctcccaactgtgatgctttttgtttttaagaggtggcgactgatttgctggagccagcttctcatctggggaagtgtctagcataatgatgggcacaacatagatgtttgtcgaattgaattaattctggtcatttcctggaggaggagagacaggatgttttaatagccagttatttcctgcgccggagttggttgggtcttcagacaccagctgaatgcttagggattctttcatttcctaaagtgcttacaaaattatgaaaaagcacgactttgctgaaaacctgccttcatctttactaatcatcatactagtcatctttactctcagtgtactgtgtccactttccaagcacccttgcacgtgatttcatttgatctgggtaacagccttgtgggtgggctgccgtcatcctgttctgtgtttacagaggtggaggctttgtcagaggcacacagttggcagagcaaatacttgacgatcctgggatgactgtttttttttcaattttgcatgtttttcttgtataaaatatacctaagatttaccctgggatgacttttaaatctctctttttaaaaagtctttgttccacagtattccttgattttctgctatgccatgcattggacaagactaaacatctctttgcaaaagaataacctgatgccttttttcttcgtgtttagggctcaaaatttgggcggggaactggactcactcagccttctcaacgcacgtctgctcggagatcatttgggagatccaagagattcagtatcactcgctcccttgatgatcttgaggtaatttaattttcatttttcttcttttctccttcaagttttaaaaaatgcaagtccaccttgcagatacgtctggctgttttttgagtccctgtggtcccctcccctcctcctctgtagtggtaacccctgttttctgggggacagcgtcccatgcacatttgggaacctttctaccctgcaatgtgtctgagctgtcacagggctttctggggtgctcttctgtgtgccagactccagtgaacacttctagaaatgagctggtttaatccccacaaatactctacgaggtagggcctgtcattgcccccttaaagacggggcgtgatccacagacatgggtaagtgtcattttgtgtggctcgtctatctgtgtttcttttgtaaagaacaatgaaaagattttattttttatagcagttttaggtttacagaaagtacagagagttcccttatgcccccacccacttgttaaaaatgcgccgtcgggatcattacgtcctgcattggtgtgggtgtttgttacagttgacaggccagtgtagacatatgattattagcttaggtccgcagctcacacgagggttcctgcccgtgctgtcctctctgtgggtttggacaaatgtccgtgccgtgcacccaccgctgtgtatcaccgagaaagccgccgccctggaaatcctctatgccccacctgtttaccctgcaccctcccgttgaactctgacaaccactgatcctttgactgtctcatttggcatgttttaaaattttatacaggtgcagctgtattctatgtcttcttattaatgtcttattctagaacatgtgtcatgttttcaagatttactcctggactttcagtccagtccttttacttgttgtatggcattctgctatgagtatatgacgatgattgatgccttccgctatcgatagacactcagtgggagtgggagagagtctgcccttacggcattcttgtacatgtctccttcagcgcgtgtgggacgggcgagagtgttcttagctgggaaggatctgcatgagcggtgtggccagactccgtccacagtgactgctccagctcctgctcttccaggagaaaaggtggcttcagggatggcaggggtcctggggattggcacgttgtggctgcaaataggaatctgcccttggatggcctgtttagctttggtctctccggggaactcgagggcaggtcagggctagcgtgctgtatctgggcgggcagcaatcagaatcggctgcaatggggtgctcatgctgctgatgaagactcaaaaggggtgtgtgctacctaaggcagggcctagcttgaggctgaggaccccgggaccatttttggctcatactgccatgctgagctgaccatctgtgcacaagtcctgttcattttcctccttttctgttggtcatgaggaactcactgtgtggccctaggtttgggctgacagagctgtgctggtgccctggtgaatgatatgtgggtctgggccacgtgctctgcacaacctgccccttccctgctgggtgtaaacttctatctcatggtggattgctgctgggtgtgccccatgccagggtcagtgccatgctcctgatagacagctccagcgtctaatcactgggtgtccccagtggatgctccatctccaccagggccctgctgctttccacatggcttgtggtccctgctgtctttgccccacaccttaaacttcctggctgtaaatctcttactggggccaaggaggatggcccaggtggcagggctgcctgtccttttctgtgtgggccctgctcgctgctggctgccttccatgactccttggagagggatctgagcagccttcccaagtgaggggtggtttgcctcttgagcccatcgtcctgaataacacggaggaaggctctctgtaagaaaacgatatttattaatatttgggaataggcattgcaatgagaatatgcatgctgtagtaaactatgaatattcagggaggtcaagaaagacagcagtttttcaaggaaaaatgaggaggatcacaggattgttttgagataattatcttacaaggatgggaccagtccaaggttggacaggcagttgcgggacagatgtcctcagaggaatatttttgtatgtgaggctgagatggcctgtgtgcaaggttgtggttttgcagtcttttgtgatggatttgttatcaggtctatgagcatgagaaccctcccttcctggccttctctggctctgtaacactttgttagggtttttaatacaagtgactccattttctttctgacaactttcacatttcccccttttaattgagatctttctccaaaagcatagctgaccagtcatcctgcagtcaggctttgattgccccttggtgctgggatggagctgtcccagtttggtgtggtctggttccacatcatcaggaagtgactggtgaccaggagtcagtgtcagagctcatttagccacatttgagcaaccagggaggtgtggagggagtggccctcaggcgcagtctacctgagtccactgttaagtacggttttgtctgttccatgggtgttggcatcatctcaacgcgctgggccagcacgattctgttaggagttgtacttctgcagagacttaagcaacagataaaaaatttataaagggaaaatgcagagtgaaattaataataatatgacaatcctagtttgcataatgttttgagtcatgaacataggcttaaagacaaccagttgaataaatcaaatgaccatagggaattgggtgagactttttataatatatggcctgtttccttttttggtgtgtgtgtactttttcctttttgtggagaatggggtttctcatgttgcccgggcagatcttgaattcctgggctcaatctgtcttcccgcctctgctgagattacaggcatgagccaccatgccccgacctgttttcttattttgggtatatggtccttaattttcccagaagaatttatccaggtatagcaggtagtatcagcaatagcacagacatttccttctttacgcaatggataatttagagcaattttatcatctagtgtcccatgactgagttggattaaagcagagtgagcaccagttgtattagggatgttcccaaagtcacccactagggggactcaaggatctcttagggttctatctagttcccagcagaagctactgattgtgaaatttcgattacaccattattctgccgagtcaaaaaggtaggcattaagaggggtaaatgtgtctttataatatggactcttattccagtgccttggagaagctgcccacagcatgaagctgtcggcttctagtcctgtcttgtggtctaagtgtctctggttgtggcatcagtggtttggtgaactcttggtgtggcccacgcatcaggaatgggattttgtcccttaacatttagtttcagcttatagggcttcaggaatagagtagttctctgcttttagtgattctatgggagaaagttggatgggaggaagctggaagaattgaggagcttggaaacagtgcacagggctccagtctaataacaggagtattgcagcttttcttcagaaacatggctgcttctctctacattgatcacacaagaaaaaaatcactccgattttaacaacctcctgaggctgggaagccaaaccaaggcagactatagattttgcctacagtcttaaggtttctgggcctgatacgaagtgacagtttttacttacccgctgtaagtctaggaacccttgaagcagggtattctatgcacgttctcaaatttgagattccagacaaggcattgggaacagaaccactggtctcagttgtatcctgctacaaagagggaacagatttttttttttttgtaaataaccacattgccataagaatacatgtgaacagtttccaaattttggagggatcgagtagggagaaaaagcaaatgtttttacttttgttttcacagaagtatactttaccagattgctgtaagttataaacagtttaagaaagataacgttctggccaggcacggtggctcacgcctataatcccagcactttgggaggctgaggtgggcggatcacaaggtcaggagatcgagaccatcctggctaacgtggtgagaccccgtctctactaaaaatacaaaaaattagccgggcgtggtggtgggcgcctgtattctcagctactcgggagggtgaggccggagaatggcgtgatcctgggaggcggagtttgcagtgagcccagatcccgccactgcactccagcctaggcaacagagtgagactctgtctcaaaaaaagaaagaaagaaaacatccttagatctggaaaacaaaacatttaagtaaagaaccaacaatgtttcaaataaaagtcataaaaacatctcatcagttatttaatctcatgtaattaatttttgttctgcttgatcttgataagtagtttcacaaattcatctgtttccttattagagttctgaagaattttcagttagtctgtcgatcttaaagttattagaaacctgtatttaagagtgcttcttagagtcttttccatgaatctgattgcaaatgcttttagagaaaaatcaaaacaataacaatggataaggaaaacagaatagctatggtttaaaatctggtggaagttcattataattagcaattgacaaggaaatctggctatttctgtagcatacaacataataactagagttatggcatattaggtttctgagagttttatacaattttggaacattcctataaaaacacacccataaatgtaactgaaagaaggtctagcatcacgtatcattttacagtgttttttatacaatttaccagataagcctaatcatttaccagacgtaccagataagtctttgtaagatgagagatacgtcctttgaggctctccagaagcttgactggaaaatactaaagctaattatgggtcaaaaagatttaatttagaatttatatcttggggaagcccatcaaagatgccaaaagatttaaaacgcctgatcaaaacaggagcacaggtcactattagataatagtcattcatttaaccagaatgagaaagacttcagaagcaacacagggagttccatgaatgtaaacaaacaacccactcaaagctcagttttcctacaaaataaaaaacttaataaagacaacacaggaaattatcttgataaaacataaaatctttgtttcgtaggccagttaccaaaaaggtaaagaaaaacctcctgtggtgtgattgcttctcctcatgggaagcccgtttggtttgcctggaagtagaagctgatgaaaagtacttgaatttaatgagacataggaagagggtgtccagtattacgagtgcgcaccgtattatagaggaatgtcaatgtgacagttagtggcttgagcagggcagtacagggctctaagtcacagtatgggaagttttctggttccatggaacaattcagacacatccagaaaagccgaatgtacagaatcgagttatacaggcggaaaacagtgcatcagaccatagtaacacagttaaaactggagaaaaaagttccaggagctgacaaaaaagttgaaggaaagagtccttgccctagccaagcaagcagctgcagcttctcaaggggagagagtggaaggcagtgatatgcggccagcaggtcacacgcagcaaggccaagcccaagccgaggctgtcagattcacctggagaggaagaccctgcctggagaaatgaaattgccattctaaatgaagacagcatttctaacctcatacgagggaaattagatggagactaaaatagaaaaaagctgcagttcagaagcttgttttataaacatacttcagaattaaaaatcaaaacgtcctgcagttttactaatagccgatcaatacttcaggaaaaccctgttgttctaacataagcgaccacgttttttgctttgtattagtgtatttttaatattaaagtttggtctttagaaggacttacacataattttcttctaattataaccaacttaatcatataaaatttatttcgtaaatttatctttcacagacttttatgaccaatataggccttcgatgacatccttaagcctttctgctttgttctgtacttcctctttcttaaaacaacaggcattttactttaggacaaaaatttaccacacaggagtctttgtcatacaaaattattcatttttgtttttaaccttccttactaagatacatctacatacctataactttcttcacatctctcgctctcctacttagtggtttctttctctttgctttctaaatccatattttgaaacaaattttaaataatctccaaactagacaaaattactctttttttcaataaagaacacatttttattcctctcataatttttctcatcagaaacataccttacttttcgtatactttgtatactgaaatatatatatgtaagaactttaactcttagtaactgtaatttttagtgaaaaccttggaatcagtattttatagatgagaaccattttataatttttggaaacatgttttcccgttacataattactttgtgtattaacaggcaaaaatatatttagtccttctctaaaatttaataagccaagaacaaacttacatttgtgttcagcaatgtatgttttagtactttatcttatatggaaatgacttagacattttatgagtatcatttaatttaacatagcataactttaagatttcagattacatgacagtctataagcactttcccatctacgtttatgtactttatttatttttaataattatacctaggttacttatgaaaactgagatatagaaaaagctagtcttcatttcaagttatttcccttttcaccatttgtatagcctatgagtatcaggttttcacctgagaaacttaaatataggggtattttgctgataacacagaagatacagcaattttgattaaactaacagtgttagtcttagtcattaaaaagttatacaaataaagataattgtgtctttagtctggatttatacttttataaccttaagacatctagtagagataaatataatcctctctgaccagtaaagctgggcaaaaatgtatgctgacagttttgaagacacttctatttttattttatcaacaaatttaaaaccaacttatttatccaagatttacttaagtcagctgggtgtggtggctcatgcctataatcccagcactttgggaggctgaggcaagaggattgcttgagcccaggagtttgagaccagcctgggcaacatggcaagatcccatctctacaaaaaataaaaaaattaggcaggtatgatggtacacacctgtagtcccagctactcaagaggctgaggtggaaggatcactggagcccaggaggttgaagccacagtgagccatgtttgtcccactgcaccccagcctgggtgacagagaaataacctatctcaaaaaaacaaaaaacaaaaaaaacaaaaaagatttatttaagtcacacgaactaaaaagcatttgggttaattactatatattttacatgagtgcttgtttaagccaatccaaatagaatttcttaagggatttctggctaactatgtcagattttatcatgtagatgtaacatacaatatgtataaacatacataaaagcaaatacagacacaaataaagatcttatggctttcattttagaattttggtcatgaaacagaaaaacatagtaatacaaattcactggtttataaaatatagttggatcaaattatatttttgacaaaacggaacttttatctgtggctaagttctgtttaccctgataagtaattaatgaaggctgtggaccagaattatggataaagcagttttcatagcagtttgacttttaaaaaccttttaatccttttttcagattcaattgaatttagggttgaatattcaaatgtttacattttagctaggcctggctaaattgtattaaaaaaaaacaacaaaattttcaggttgccttgaattagtaacaaatctttttgtttgtttgctttttctggctcttaagtgtcagacaaaataatttttatgtcagacagagataccttttagtattgctctgagcttaaggttttaacctgtttgatctgacagcccttagcttatataaacatttataaagttttttttttagaatatcgatttttcaattagctttttcatcaccctaagcaattgttagacaaacctaaatttacatttccaaaaggtgtctgcatcgttggttgccatagatttggcataatttataaagccattagtttgaaagccctttaacacttaaaagaaaatcttagtttccataagcaatgagtttatcttaatgctggcagaaaagtcatcagattcaaagttggcagaaaaaagagatggagagttaaccctgtagttagttgcagtttttgacaagcttagacagaaaatggctgtccagtgctgcgtttttcctgatgtagtttgcccatcaccacacgagaacggaccacagtatagctggccagagtcctagaagacttggtgtgcctcaatgtttaagaatcccatttcatttcttattaatctctcaagagcaaagaaaatcctataattcctgtcagggagtttagactggtgccttatgtggtgctgactgcccttgttaattggccatcccatacccattatttagaatctttatttttgctctcagatcatggccagaatcaagcaagggaaaaaagagccaaatcatatacagatgtgtgtaagcaaatcaaaataaaacaaaaaataagtgtgttcacagaaattttaagccaggcatgcagtccaaacaaaacattaaaccgggtgtgcagaaccagacagaatataaattctgtagtaaccagagggacattgtccttataccagaaggggcttgccagaagagacaaaaggtcttttatcatccgagacagatgcaaggtcctttattaaggtcctttattaactcagatcccaaatgaagtaaaaaagagcttctaacaaaaaatgggaggcttggtttgagaggagactttcaagggcagaagaggcgagtcatggaagcagagagctcaaagggctcagttgagtgcctcataccagttctaagaattgatgattctttccacaggtgatccttctccacatcccacttctgacaccatttatgtcatcctaaataacaaatagggagggagactctccaaaagaaaatggtatttattcaggaataggcattgcgatgggatacacattatggtaaactatgtgcatattcagggaagtagtggaagataaaggtttctaatggaaaaatgaatatgattacataatcgttttgagataatttttcttggctacaaggatcaataacaagggtggcatgattctgaggctggacaggcagttgctaggcagatgtcctcgcagaagtaatttgcgtatgtgtgtaaggttgtttggcctttgtgcaaggttgtagttttccagtcttttgtaataagtcttgttatcaggcatttgaaccctgccttcccaaccttccctagctctgttgatcagggtttttaacatagtgactccgttttgaacctgacaactttcacaaacccaaagaggcctaccagccattggcttctgtctgacagacaagagttgtgagttaaaataatttgtccctttctttggaagggatgtttgactcctaaaactttgccgatggggcaggccactgagtctctctaggttctgtctcgcaccctccagagtgcgtgtggtgtgccaaggcctccggcgtactttccgcttcttgctcatctgctccagttagcctgatgttaaaggtataatgagccactgtgatgttctgagttgaaccagatcatacaggccctctgggactactttgctggagggtgggagggttaacgaggcctggggcaggactacaaacgtacactactgcctagcctatgtgagagtgaactgagtttcatctttctgataggaatggaaaagaaggcattcctagatcagtgtgtgcacactgcgtcctggggggatgttactgtactctagcaaaggtaccacatctggcacagcagctgtgaatggcgctgcttcttagttaagtttgtggtagctcactgtcatcaccgtgatccatctgaactttgtaggaccggactggtatgagttaacttgggtatgacagggactaccactttcaccttttttgaagtcttcgaggatggtaccagtctgggctgtttcttccctgatgtggcattgtttttcactaaccgtcttggtttgagttgggggaaggagactgtgccacgggcttctccttgacttttccagcttagtagctcttacctagtgagtgaaggaaccaatgtgagggttctgccagtcatttcatgtatatatttgggaactagggaaatgaccatgggtggatctgtggatctgttgtgagctagactggggccaggactcccttcataacctggcttccatacgccccctctttatagggagaacgtggtagtgctttgggtccacagatagtgtccattcataccctaagttcaacaaaaccagaaagctctgggcactcccctttccttaacacactacttcccaagcaagtggccaacagccctatggagaaagactggggaaatgactattgatgacacatgccttggtgttacagggacctgcctaattctgttctggcgttcctttaattagtggcttccaggtttgagaaatggctcacatttttcaaattggacaaaggatcatgactttatgggggttgctgccctaggccttgattctttaaaactgtgtaaattaagcaatacccttgctggctgcccagccagcttgccccaggaacaccttgttttcctcccgcaacatgggaagcctggtggagctgagaattccacttattggaggctctgctcacctttacaagtcctgagtggggctctgccatgtctgccttctggctgtaggggattagggctttattagattctgccaggtacacacctgcctttcacattttgtctttagttggtacttaatcatactgggtgtgttgatgactctctctcccaaatggactttcatgtgatgccacactcagtaagtgcattcttcctaagcccttggaacattaacaaaagctgatgaacctgggcattacatgtgctggaccgtaaagcaagtctcaaaaatattcaagcctgtcctgcagaaactgtttcctgccacagtgcaggtacactgtaaaccaacagcaaaatgtgtttgctaagtaagcagtccattgcaaaataatccagagttcacagacgcaatcacaatgggagctagaaagcgttttgaaacaaacatcaatgagaatactacatatctaaacttgtgggatatagctgaaactgcacgtaaaggagagttcacagctttcagtgtatacattagaaggaaaatagaatgtcatctcaagaagttagacaaaaagttgtagaacagaattacaggacgtcaaagctaggcaataataaaaggtaaaagcatcaaataatgaaacagaaaaatgacaaactaacaaaaaataaagaaagattatttcccaactcattttatgaggctaccatataaccttggtatcaaaaatctgacaaaggacataagaaagggaaatcataggccaagcttgctaataaacatagatgtgagaatcctaaacaaaacattagcaaggtgattccagcaatttataaaaagggtaacatacacatttgtttcaaggacacactattttttaacatttgaaaatgaatcaatttaacttactattttaacagaatacataaaaaaagtattatctcaacagaagcaggaaaggcatttggtgaaattcggtatccatttatggtaaaacaaagttaaaagaattaaagggaaattccttaatctgataaggatatctaaacactgtgtggcatcataattaagctttccctttgccatcaggaacaagagaaagatttcaatttaaatcgttaccggaagtcctggttagtgtactaagaaagtaaaaacaaaagtttaaaaagcttgcaaagaagaagtgaaaatgttactgttctcggatgatgtgattgttactgttctcagatgatgtgattgtaacagaagatccaaaagtcccgtggtggctcacgcctgtaatcccagcactctgggaggctgaagtgggcagatcatttgagttcaggagtttgagaccagcctggacaacatggctaaaacctgtctctacaaaaaatacaaaagttagccgggtatggtggtatgcgcccatagtcccagctgcttgtggggctgaggtgggaggattgcctgagcctgggaggtcaaggctgcagtaagctgcgtttgtgccgctgcattctaggctgggggacaaagtgagaccttgtctcaaaaaaaaaaaaaaaaaaaaaaggaaaaaagaagaaaaagaaattccaaagtatctgtagatcagttattaaaatgaattaattcaacaaggttgctagatatatggttaatatacaaaaatcaattgtatatacatttagaaaatgacctatagattcagtgcagttttaatcaaaatgccaagaggtttttgattaaagaagatgattctaaaatcttcatgcaaatataaagggcagagattatctttttcaatttttttttttttttttttttgagatagcttcttgctctgtcacccatgctggagtgcagtggtgtaatcttggctcactgcaacctctgcctcctgggctcaggcgatcctttggcctcagccccctcatatagctgggagtacaggagtgagccatcatgcccggataatttttgtattttttgtagagacagggtttcaccatcttgtccaggatggtctcaaactcctgagctcaagtgatccacctgccttggcctcccaaagtgctaggattacaggcatgagccaccatgcctggcctttcaatttattttaattgtggtaaaatacatacaacaaaatttattattttaaccatttttcaatatgcagttcagtgttattaaactctttcataatgtgcaaccatcaccaccatccatctctagaagttgtttcatcttgttaaactctataccccttaaacactaattccccattccccccacccccaacccctggcagccaccattctactttctatctctatgatttggactattctaggtatcactagaatagtattcactattctaagtgaaatcgtacagtatttgtctttttgtaactggcttatttcacttggcataatgttctggggtcatccatgttgtagcttgtgtcagaatgtccttcctttttaaggctgaatgatattctactgtatggatatactcacattttgcttatctgttcacctgttgatagacacttgtgttgcttccgtgttttagctattgtgaataacactgctatgaatatgggtgtataaatacctgttcgagttcctgcttcccattcttttgggcatatcccaaaagtggaatttctgtatcatacggtagtcctatttttaatttttgaggaaccaccgtactgttttccatagtggctgcaccactggatattcctaatgacagtgcacaaggtttccagcttctccttgacaacagcactttctgttttttgatagtagtcatcctagtgagtgtgaagtggtatctcatttttttgatttgtatttccctaatgtttagtgatgttgagcatcttttcatgtgctttttggctatttgcatattttctttggagaaatgtctactcaagtcctttgcccattttttaattggattgtttgtttttgttgttgagttatagaagttcctctgtatgtattccagatattaaccccatatcagatacgtgatttgcaaatgttttctcattctgtgggttgcctttttactctattgatattatctttggtgtacaaagttcttaaattttcatgaagtccaatttatctattttttcatttgttgcctgtgcctttgatatccaggaaatcattgccaaatccaatgtcttgaagaaaaccctgttttcttctaagttttatagtttcaggtgttatttatgtgtttgatccattttgaagtaatttttgtatatggtgttaggtaaaggtccatttttattcttttgcatgtggatatccttttcccggcaccatttattgaagagattatcctttccccattgaatggtcttggtacccttgtcaaaaatgatttgactatttatgtaaggttttatttctgggcttcctgttctattccattagtcttatgtgtatgtctttttgccagtgccacactgttttgattactgtagctttgaaatcaggaagtacaagtcctctagctttgttcttctttttcaagattgtttgggctatttagggtctcttgaaattccaagtgaattttaggatgggtttttctatttctgtaaaaaagtcattgggatttcaatagggattacactgaatctgcagattgctttggggagtattgacatcttaactatatcaagtctgtccatccatcaacatgggatatgttatatttacttatgtctttattcctttcagcaatgttttctagttttcattgtacaagtctttcacctccttggttcagttaattcctcagtattctttttatactattgttaatgtaattgtttttataatttccttttcagattattcactgttagtgtagaaatgcaacagatttttgtgtgttgactttgtgtcctcctgttggcagaattcatttgttagctctagtaggtttttttttggtggaatagtctacataaaatatcttaccatctgtgaacagagataattttacttgtttgtttccagtttgggggcctttcatttctttttttgcctaattgctctggctagaacttacagtactgtgttgaaaagaattgtcgaagtgggcattcatgccttgttcctgatcttagatgaaaagctttgtcattctccaatggagatgatgtttgttgttaatttttcactaatgccttttatatgttgaggtagtttccttctatttctggtttactgagtgtttttttttaagtcatgaaagggtactgaattttgtgaaatttttttgcatcagttaatgatgtgattttccctcttaattttgttaatggggtgtattacaatgattgatttttcatatgttgaattacccttgcattataggaataaattccacttggtgatggtgtataatccttttaatatgctgctgaattcagtttgctagtatttggttgaggatttttacatcaatattcatcatgaatattggtctctagttttcttgtattgtctttgtctggcttgatgtcagggtaatactgtcatagaagaggaagtattcctccttcccctcctccgcctcccccttctctccttcctcccccttctcctcctccttctcctcctctctgtccccccctcctcctccccttcctccccctccccttcttcctcctcctcccctcctccctctcctcctacaccctccccctccccttcttcctcctcctcccctccccctcttcctcctcctcccctcctccctcctcccctccccctccccctcttcctccacctcccctcctccctctcctcctcacctccccctcttcctcctcctcccctcctccctcccctcccctccccctcccatcccccctcctcctccctcctccccctcctccccctcctcctcctccccttctccccctcctcctccccttctccccctcttcctcctccccttcccctccacctcctcctctccctcaccctcctccctctcctctccctcctccccttctcttccccctccccctcctcccccttctttcctcctccccgttccccacctcctccttctccccctccccttcctcctccccctccccctcctcccccttctcctcccccttctcttcctcctccctctcccccttcttcttttagaaagagtttgagaaggattggtattagctcttcaaatgtttggtagaattcaccagtgaagccctcaggtccagggctttcctttatcaggagatttttctttattactgattcagtttgcttactagttataggtctattcagattttctagttcttttttcttttctttttttttttttttgaggcagtgtcttactcttttgcccaggctggagtgctgtgacacaatctcagctcattgcaaactccacctcctgggttcaagtgatcctcccacctcagccccctgagtagctgggagaacaggtgtgtgccaccatgcctggctaatttttgtatttttagtagagatagggtttcgccatgttggccaggctggtctcgaactcctgacctcaggtgatccgcccacctcagcctcccaaagtgctgggattacaggcatgagccaccgtgcctagccatacttttacattttttttgtagagctggagtttcaacatgttgcccatgttgtcttgaactcctgggctcaagtgatctgcctgccttggcctcccaaagtgctgggattacaggcttgagccactgcgcctggcgagattttctgtttctttatgatttggtcttggtaggttttgtgtttctaagaatttaaccatttcatctaggttatccaatgtattggtgtagagttgttcacagtactcctctataattcttgctatgtctgtggaattggtaataatgtcccttttatcatttctgattttagtaatttgagtcttctctttttttcccttagttcattgagcaaaggatttgtcaattttgttgatcctttcaaagaaccaactaggttttgttaatttttttcttgtttttctattttctatttcattgatctctgctctaatctttattatttcctttcttcttctagctttgggtttcgttttttgttttttgttttttccctagtttcttaagttgtaaaactaaattgttgatttgagatcttttaaattttttatgtaagcatttaaggctataaatttcccctttagtactactcttgctgtgttccatacgttttggtatgttgtattttcattttaatttgtctcagatattttctaattgtccttatgaagggcaaaagaaagttacagatatatcttcatgatattgaggaggcaaaagcttttaaaacagacacaaaaggcacttactgtaaaggcagactgatgattttgattaaatgaatattaggaacttgcactcatcaaaacataccgttcctagaaagaagggcgagaggacagtgcggctaacccacaaaggccgacggaccctgagaatgcagcacgtccatgagaatgacaaacggctcaaatgcacagtgggcaagggatttgagtagacattttactacaggtgctagccaaagtcacatatgagaaagtttccaggcaaattcctagagttccatcatgtgtaccaagagcatgtgcaagaattcaaaatagcagtattcataagatccctacacggaagcagcctgactgcccaccagtggtggaaaggacagatagcctgtgatttattcttgcagtgggatgctcggtggctgtagaagctaatggactatggctgtcttaataacatggataaacatcacagaaagatggcagatgcaagagaacgcacctgtgtcattccagttatagaaatctggaaacaggcaagactgttgaaaaccatggttttaggttacatgcttcactggtagcaccataaagaagagctggaacatggttctgcttttcattgtgaacggggtgagggctacgtgggcttcacttcatgataaaccaccgagccatgcttttctgttttgtactcttctgaatttgtgttatagttgatgacaaaaatggcagcttgattgtgagtacttttttcccgcccttttgaatggctggggcatcagcccggagcaggctgtgttagcgtctgggatgagggtttgaaagtgggcctgaaagcaagatggggcctgggacctgggcgcatgagcagaaatggcgaggggcaggctggcctgtgagccgggtgggatggaaaccgagggcatgaactggcgccaggtagcaggagcgagggaaggccctcagtggggagcacctggaggagctcccgaggcaagaggtggaggtcagaggatgacatagctgctctgggaattgcaggggcgagttttgtttgttctgcaagggaggcagtgacaggcctgttgaggaaggatgcagtcagaggggacgtctctgccttccaggtgttaagtcaggttcagacagagatggtctaaagtgttggcgaaatgtcttcgagctacaccaagggcctagaagacaggcccacgtgcatcagtgcctctcacaggacaggctcctggtagagctgtgttcttgggactgaggcttgcagggaacaatgcccccaacctgcctggggaagtcagtgttgggagccaggagccagcgtgtagcgctccccctcgtcaccctcacccacagcaggctgcggccccgagggggatggagggcggccgtccgctgtggatggagctgggctggtgcacttgggttttgttcacaggtttctccacgtgtgttccctgtctcaaagggcagcggcagtgaaggaggggtagggtgctggggaccgaggtgggggacatggggtgtgggtggggttccagaccctgcccaagccaggcaggactgggtctgcaggacctcctgcgagtgccaggttgaggggcacattttcccttagctgtcctgaccagtgtgtcgcctcatgtcatgaagagtgagagtgtgtgcgtgtgagggtgtgtgtgagggtgtcagtgtgtgaggatgtgtgtgaaggtatgtgagggtgtatctgtgagggtatgtgttgtgcaagggtgtgtgtgtgagggtgcgagggtgtgtgtgagggtgtgtgtatgtgagggtgtgtgtgagggtgcgaggatcagtgtgtgtgagggtgtgttgtgagggtttgtgtgagggtgtgtgtgatgtgagggttggtgtgagggtgtgagggtgtgtgtgagggtgcgaggatgtcgtgagggggtgtgtgtgaatgtgagagtgagggtgtgtcagtgtgggactgaggctgagtgtgagggtgagggtgtgtgtgagggtgtgtgtgaggctgtgtgagggtgagggtgcgaggatgtctgtgtgagggtgtgtgtgaagatgtgagggtgtgagttagggtgtgtgtgagggtgtgtgtgaatatgagagtgagggtgtgtcagtgtgtttgagtgtgagactgagtgtgagggtgtgtgtgtgcgagggtgtgtgtgtgtgagagcatgtgtgcatcagtgtgagtgtgcatggcaaggccatttggaacgcgaaggggtgtgtgtgcacgtgccagtgtgtgaaggcatgtgtgtgagggtgtgtatatgtgtgagagtgtgcacgtctgtgagtgcatggcaaggccatttggaacgcgagggtgtatgtgtgtgtgtgtgaaatagtgtgtgcgcatgtgtgaaggcgtgtgtatgtgagtgtgtgtgtgagagtgcgcatcagtgagtgtgggggtgtgtgtgcgcgagggcgtgtgtgtgagtgtgcgtcagtgagtgtgcatggcaaggctgtttggaactagcagttctgtccctcttcttaccccataaatcctagtgtttttggaattatttctgcaaagtggcattatgttaaaatggaaaaagtgatcggcgattataattttctattgtttccgtcatcaaagagcttcagctgttttaaagagaaaccatttttaaaaatcctgtttcagcttggctcatgctctgtttctttgacgttcgttttgggctccagcctccccgagagaccccaggccttgtggttagttgactcccggtaaggagccgcggggcctgaactgctgcttgttggcggtggggagaagtgcagcggcaagaggcgagacggacaggggtgtgcgggttctgcgtgtaggagaatctgcttgggaaaccacagccctgcctgccgtggagatggacgcagcgtcccgctcacccggcgcacactgcagggctccatgcgggagtgaggcggcagcgcgtggacctgccggccctcctgggttggggcaggcttggcgggaacagcccaaagaccaacagtggttcccaacaagagctgggagggagtggggtcaccagagtgaagggaggcagacagaacccctgggacccaggggtcagggactggaaggaagcttggtactagaaacctgagggtggcctggagggctgggaggtacttgaggagtgggcgggggaagctggggaagggcagtgccgggatggggagggcacaggccccccaggcttgcagaagccatgctgccggagaggccgggcactgggagtctgggactctgctcagtcacatggtctgtggtttcaaacgcttccctctccgattctgcacgtgtcttgagatggccaggaactgtattttattcatatttgtgcttttctctattcaccaggaaaataagcaggatttatcttagatgaatcttgtaactgtttgtaagggttgctgtataagccctggggatggccttgtcatctcttgagttctggcttggatgtcaccatccgacactagcaccgcatcactggctgcacgtcggggctcctgggctcgttacgtccatctgccgtaactgtgacttggggcctccgtgtctgagggcagcccctgcagcctgtgctgagcttcctggcactgggctcctctcacccagaggccctggcagggtgggtgtatccgcagaacctgctcctgcagatgtccccatggaggtcgggccgcactgttcctgagctgcggttcagtagagctgggccaggcaacgtcctgcctttgggagcttgccctctgcttgggagagttgaacaaacagcagcagcagaagactgtccaggggctcgtggcccccggaaacgaggccaggtgatgtggggagtgcccgacgctcagagggagccagggcaggtgttgggacacagcccagggcctggggcagctgggtgtcccagggacagagggagggagagccgggctgacacctggacttagatattttaagtgtgacagaagctttgggtaaatttattgccgggagctgaaggagagggcgactgccctgtgtgtggcttggagaatttgggggccttggctgatttcccatcacctgacttggcggtcgctgcctgggagagccagggcctggctgctgcaggaggaagcttggcacctctgcttggaaggaccctccccgtggcgagaggaggctgggcagggtgcgggacccagaggggtgcaccctacacaaggcaggcagaatccaggtggtcactggatggagcctcctgcacccagggcagaagctgcacctttccaggggagcagaaggggcatcctgggtgacaggaggatgaggtgacggcggtttgcaggttccccgggagctgttggagccaggagcctgggctggagcctgggagagacctggactcagggactgggcagagaggggatgttcagggccagggatggcagaccgcagtccccggccagatccactgcctgttcttgtaaatagagtctccctgggctgcagttccgtctgctgttttcatgctacagcggcagagtggggtcgagtgcgtggtgtcgcctgcacagcgggcagtgcctactcttggccctttacagggagtctggagggaggagggagacaggtgagaggagggagggaggacaggtcttgagggagggaggagggagggaggtggcaggagcttttgcgtctgtccccagtgagttgccttgattccatcttgaggcctgtactgtgatcttgcccatccagagctgtaaatcccagcaaaaaccgacggagccctgagtccgacctaagccttagtgtgagtcggacacggccttcttggctgttgggttgataatgttggcttcttcctggcctcccactcacctctgggacgacgtgccgcacgtcacattgtgtaggaatgagatcctcacaggcctttcagaataagctccttttaccctgtctcttaggtttgcgactttgctattttcagaatttaacttagaaatctttgcttgtcttggtctttcacacaccagtctgctttttaaacccattatatgggaaattttctgaactgtccttaagatcctgtgaactccggacatgtaataggattcttcagtgcttcagggccttctcattgagtgaatgtttgttgaacacctactatgtgcccgacattattttggctctggggaggcagtggggaacatgctcagtgttgacccctccctgccttgtggagctggtcctggatgggctgcatggggcaccgttgcgtggggcgtgctcgaggtggagacggctgtgagcagctgcaggccaggcagtggtgggacctcatctggggggtgctggcctgggcagcaccatgacccacccgagaagggcaatggggaaggaaggcaggcaggcaggacagccagactgttaggggttaggggttaggcacagggctggggcgggtgctgggcagactgcaaagggtcagactggcatatggcggccagctgtctagttggttatgcggggtcaggggtggagggcaggaggatgggagagcccagctgggggagatttgagggccctgcccatagaggagccacacctgggcctttggcttggcgaccagaggcctccagggttaagagcagggagagaatcagggcctgtgctcatatctgtgagctctgcagatgtctcccgggcacagtcagcagaggcgctcctccagttcccgcctctctgcctcgcacgccctcctagctgagagtgaggtggtccggccccgtgaaggaggcagcagggcttgcggccgggatccaccagggccgtcccggttcctgggtgttccgcgcccgtctcctttctgctgttgagaaaccttcaggagagagtgcttctgttccctccaggtcgagctgtgcgccaggcatggccggaaagctcaggaggccctggttaggctggggcatcacgggatgtgtcctctagcagagactggtgtgggtgggcgcaggaactggtgagagaggcctgggagacaggtgagtctgtaaggaggcccagagtcaaggaggagctctttggcaggtcctggagaccctgggtcacccacaggcccctttgccttcactggaactttccagttagccaggcctctcctggccccaggacatagcccacgtgggtcctcacctctgcccggctcagctcctccccgcccagaatgccctctgccccgccacccccatcatccctgctgccctggctggacccagagctcccatctgcgaactcctccaatctagccctgcccccctgctcaccctgggtttccagctcaggacagacccctggggaggtgaggggctccctctgggtactcaggaagcatgtcctgttgtccagctgggcggtgatatgcaggcctgagtccccgctgcaccacagctgcctccaggctcacatgcccacttgccgagctcaccacacgggggcttcgccttctctgggatccgcggtgggcctgcgttggagggctgagaacggctcgccctttccgagctagcactctgcccactttctcttcacgccccgtcctggtgaggcggtgcctgtgcagcgcatgatcgggtgctcccgccttgcggtgctttcttcctgtgcccagactggccatgcatgtgttggtgaagggctgtgctgggcttcccgggcccggggtctgaacccgactcccaccaggcactgagtaaacacatccatccaaacaagggaggtggagcacgaagcaggggcaatgggctggggcccagaatcttctggggatgtggctgtcagcagctcctggacctctgaccatgtggcagggggctcatccccgtctccccagggcacttgctgctggggccctcaggcggtcacaggagttctcccaggcgtgttctggccctgccccatccctttcctcacccatctgcagaggggagttactggctaggcaggggaggtcagcagctgcagaaaaggacaggctcccacaaaagaggagatggggggagcctagagagagacaggagaacccggaggccctgttgttggaggccctgttgttagtgaccggacagcaacaggcggacccctagcagcctgggctgctttgtgggctttgcgaataaaccacgtagacaatgtgaaattgtgtttcttcctttccgtcctcgatggaacacaatgggatgaagatgtttctgtctgaaagaactgaggtgaaatcagtttagcacttaggtgataacccctcagcagaaggccccacgcatgcccaggctgccttcggttctcaggcgctggtggctgttcccagggtctgggggccctggggggccaggatgctgttgtcctctgctcccgcctggagaccactgtctcctccaaagctctgtaaactgtcagtagtgcaggcccctcagaagccaatgaggttaacgggcaggtcagcgtcaggggctcacccagccaccccagaaccccttgctgttgttccagaaccttcagattgctttctctgaaagtgtgcctgtgtgtgtgcctgtgtgtgtgtgcacctgtgtgtgtgcgtgcctgtgtgtgggtgcctgtgtgtgtggggtgcctgtgtgtgtgtgagtgcctgtgtgtgtgtgggtgcctgtgtgtgtgtggggtgcctttgtgtgtgggggtgcctgtgtgtgaggtgcctgtgtgtgtgtgggtgcctgtgtgtgtgtggggtacgtgtgtgtgtggggtacgtgtgtggggtgcatgtgtgtgtgtgtggggtgcctgtgtgtgtgcctgtgtgtgtgtgggtacctgtgtgtgggggggtacatgtgtgtgtgtggtacgtgtgtggggtgcatgtgtgtgtagggggggtgcctgtgtgtgtgggggtgcctgtgtgtgttgggggtgcctgtgtgtgttggggggtgcctgtgtgtgttggggggtgcctgtgtgtgtgtggtggggtggatgctgacgggaaggcaggggacgaggatgctggttttgtctgagagatgtggcttagcccaggaatggtgatgtggtctggtctatacgtgctccgccttctgtcatactgcctgccatgcctgtcgtacctaatgtagaccctctggcccagagcccaggggaagtgggtggggccatggtaggtagaggcggggccctgtcgaggaacagggcttctgaggccactccagacctatggggctgaccgggggtcccggtagcttgggcgggagccccttcctgggctggtgacagaagtggaggtggcacccctttcagcgaggagcagctgtgcagagggaggtgtggctgccttggggtgattcctctgcttgctgggggtgtggctgggcgcctgccccccgcccctgcagactcccccacacttttgttacgtgcacagctcctgagaaaagccttctaaggaagcttgagctgctgcgcattctgcaagcagccattgtgcatttctgaaacgaagtgtgtgtccagtgctgtgggttctgctcactgaacactctcgtgcggggaatgctcatgttcctccacagaaaggcagaagcagagctggcacagttccttcccagctggcagcccaaccccagaccccagagccatggacctagcctggtggccctgtgggcattgagtttgcagttcctggcaagaagcttccccaggtctaatggcgaagcttccctcaacctaacgtttcagggttaggactcctagagcccattaggacgagactctaggtggcccatgctgcatgattttgacagcagggaagcactttgggatgagcagtttacccctaaatctctagaaaattaacagatgattttgcagtgatccctaggctttacaaatagttttctttttctttcctccttcctttttagagccaggatccatcatggttcactcgctttctggttgtttcatatatttggagggtgggcagagcagatcacggaatacagatagcactgagagggctttaggcgtgtgccagatcccgctggctgccacccagtaagctggtgcatgtggaggcttagaatagattcattggcagctgtaattaaggttgtgaactgcaccacgatgctaaaaaaaacaaattctctgcagctgttttactgactgagaaattacccctgtcggccgaagttttattcttctgatttggtagaggaaatagtttaaaaatgatctcacagcgtgatttatgtaaacggcgcttctttctttggatgagacaattgagatagagtctgaaaccctggcaagccacagcttcctgcagtgtcctgttgccatgggttacgaagggagcgagagggaacttcatcggaaatgcctttaaacttttctcacacgcacaagctgcggtgttgaatggtgtgtcttagacccgggtgcctagtgtggctcggtgccttacaatgaatttggggaaagagttgtcaaacgaaacccatgtttctaatgaccagcaggtaagtagttccggctttttcttttcatttaatcagtggtaggaaagcgtggcaccctggctatcctgttttagcgagtggcagctgtgggacctgcaaatgcttgtaaggataagctttggaaatggttttcatgtgtctgcaccacagctcaaagcgagtgctgcgggggctcagcccaggctctgggaccgcagcacgtcccgggcccgacacacccggccgccggcctcaacccctcgggagcccaagctgccaggttttaagtcagaacttacggaaagcgtcagatgtttttcctttaccgtggtaattctcatagatttgaaagatgtgagtgaattgattttgttgaaatattaattttaggctagataaatacattaaaatcttaggctctttaaatgatggtagcttaacatttctaaatatgatgagttgatttggctattgtgcatatagatagctactatagatcatattggtgattactatataagcttatgaagttgaagttactctaaaatggctttttaaaagatttgagatgaaataaaaataatttctattttcctcttaaggctgtgttggtgcaaagataaaaataaatttaaattatgtacagaagtcttagtaattactgggcactgatttcgaattcattcttttctgggaattgtataatcttaatgtttttctaatatctaattaaagtcttctgtagagaagcgaaggacaaactactagtttagagatgaggggcatggaggggttgggaacaggaaaatgagccgcgtccttccttttaagtgggaaatagacatgggtctgctgggcagggccagcatgagcctgatgaaatcaaccggctttctgtgcacgtggaaagctgcttggaaggtgaagctgcgtgaggctcggggagcagctctggtcttctttggggcgtgcctgccgcgggccgcctctggctgtcttggggcagggggaatgtgttcctgtaacctctgtttcatatcctgcgtcggaaagtgaattttggagctgtcgtgggtttaatgggccagttaatcagttagccatttgtacttatttgtaggcagcactttcatctcagtgtatatccaggcaaggtgtagaaaattttgtttttttattccgagtaaagtcattaaaaacctgcctttgtaagtatctgtttacatgatttggacttccttttgaagctcttgcaaatgcttacactggcagataagttgttcacgggagtgtattggaatctggctgatgtggtcgtcaggcatcagaagtgagcggctccccctctcgcagtcagaggcacagcgggtgggtgggcgtctctgctgcagctctgcctggctgggtcctggccagcagacgaggggctggaaagcctctggggtcggcagaattgcttctccttctaagcttcaggtagttgttctaaaaaatgggagggtcagggaatgctggggtgccgccgtccgtgtccgcagcagcgctcttttggagttccgtgtgtctccagctcccctcatcttgagggggaggatgcccccgcctttctaggagctgttgcccgactccattcaaagagcacgcgggggagctgccgggatttccacttggagagaatggaggctctggctggccagatcagtcgatgcctggttccctggctttggcaggccgggaagatgcccgtgcctgtcacctaatcggggcacctcatcctgtttcataaaccatgtggcgtcaggtgttgcaggctctgacactagttagatgctgagaggaggcacggagaccccagccccaaagaaataggaattgcctggaggaagagagcccttgtggtctgtctgcgcacccctcccagggtgccctgctgtggggtggccgctctgggctggggggctgctgcagccctgggcagcccagcttgagcctccctggcaggcagcggccgttcagccagcctgtggctgtcacagggtcctgggtgggactttccggggcagttccacctctcctgtgagttgtgggaacaagtccccactgcaagtgagtgcccaggtgaaggccctgctggcgcacggctggacaagcatgacagttgtcgcggagccgcccgagctgttggcttccccgatgttccccctgtgctcgagctaggggtttgactttagtcctcagctgtcagaggccgcctcgggtgcatccacgctggcccccccaggtgtgccctgtgtggccggcatggaggtggcggcggccatcagggtgtggttttgtgacgtctcagggtgtcctttctttccttcatgagaagaagttctgcagtgtcagacacttggcagaaactttgtttctcaaggcaaagccctttagagacttgggagcacatgaggtgcggtgtagatttgtcttcatttctctcagcacggggttgtcttcaggctgccagagcgtgacagaaagaactttctagagaccacagggcttctctccccttcaggcattgacgttctgtttaatattttaaaaatctttaaaaagggttgcactgtttaaaaacgtggaatattctcttgtaggcagtgtggaggccatggtcgctgaggaagggcaggagggaggaggcgtgggagctggtgcagtctgcggcccggcgtggctgcggtcacacagaggatgcggtgagacctggcagcgaggctcgaggcagacagacgctcatgcagggcagagggcaggacccgtgttggagcctggggaagtgaaaggataatgaggaagacggagtgtggtcacgagggggcggtggctgctggcgacacgcagcagtcactctggctgcagccttgggccccatgccatttgactggaaccttcactcttccctcgcgagtctaccacgggcgggccggctgggccaggctccagggtcccccgacagagagtcccagcccctgcgggaccaggttgtgttagggcctgaggctggtggcagtggtgcatggctgatggccgccgcaggacacaagagggtttcgggggcgtgcctgggctgacgtgtctgtggacacctctgctgggtcatttctgagtctctgtagcatgagcttggtgggccatccgggaaggtgttcgcatttcaccgtgtctcttttccagcctggattaacccagtctctctcatcagtgtcactgaccgcgtctcttaaatggccctcgtgtgcccatgctcctttgggaccccgaagtgcagtgctgactggtgctgggatcgcagggcgtgcacaccctgtgtgctgtggccgtgtgcctggcctctgcccgcctgtgtcctgctgtatcggtcagcttacctttcgccccagacctctgttgccctgagcctggtgcaggagggcctggagtctgtgccggcgagcatcagcgcgtcccacttcagatgctggttgcagattcttctctcgttttctgacactctgagtctcgtcatctatataaggaaagatccaagtatatttgagaaaaactgttttaatacatttctattttcacctcttcccccttcttttcattaagaaattggacaccttgtgctgtaagctgtccgtccatgttacatagtcagaggtgtatccttctcgggccaaaaacccccagccctttcccctgggtcctgaggaggaaggcagcgagcccgcttggcgaggcccttgagcactcagcaccttctcctaccatgtcccacgcggctctgtgaacgcaggcatccctgtctccgttgggcggatgtggaggctggttgaggttccttgcaacgcttgccatcctacgcatgatgcagggaccccggccctccgcagacagcaggagctgccgagctccgagtgctgggccagcttgccttgggcttctgcagcagcgccctccgggttcccctcctctcctccgactccactggcttttcaccactgtcaggtcttcacgggggaggcctaggctgggcggggaccggtctccttccgccaccaccttccacgacaggctcgattcgtccctcgcatgctgccctcccagcctggccctgcagcagacacttctgccctgggccccggtctcagtgacaggtccacatcttctcaccgtctctcctcggacatccaggaggcccctcagacttaagtaccaaacaagacttggattctcccctcgcctccagtgtacccctccctcagtctgccacatctcaggaagggatgtccctgtcccttctgcttgagcccacaccctctgatactccacgtcagcaagctcctgggctcggccttcaaaatccctgagtttacactttctcacccccattgctgcagcctgccctcgtccccatctcttgcctggagcaccacagagcctccagctgcccctgccctgccctgtccatgcacctgccagagtgagcagcgccatcctagccgcccctgctctttgccccatggctttctgccttggactgggctctgcggggcagggctgccagtttggggtttgcatgttgattttgtacatccagcatctcaggatggctcgccacgtcatgggggctcagcagatgctttgccaagtgagtgggagcgttctcagcttgcgtttgccatgcaccgcctgtccctgtgggcagagcagttcataaccccgtaaccaacccatgggtatgccagacaccgccaagggggctgccaggaggggtcggagctcaggggccagactgagggagacaggaggctcagagaccagggtttagctgcacgggaggtcattttgagacagtcgctgagtcttggttcatatgaggaaacgtttccctgggcgtgaactccagcctcatctccagccctcatctccagccctcatctccagcctcatctccagccctcatctccagccctcatctccagccctcatctccagcctcatctccagccctcatctccagcctcatctccagccctcatcttcagccctcatctccagcctcatctccagcctcatctccagcctcatctccagccctcatctccagcctcatctccagcctcatctccatccctcatctccagccctcatctccagcctcatctccagccctcatctccagcctcatctccagccctcatctccagccctcatctccagcctcatctccagccctcatctccagcctcatctccagccctcatctccagcctcatctccagccctcatctccagcctcatctccagccctcatctccagccctcatctccagccctcatctccagccctcatctccagcctcatctccagccctcatctccagcctcatctccagccctcatctccagccctcatctccagcctcatctccagcctcatctccagcacgggatgagctcctggtggccagctgtgttacgccagtccctgtccagaacctctcagcacagctgacttttacactcatctttccttgcggggggttggcactgacacattggaaacctgagtcacgaatgtcggcctggatgcctggcagcctgccacctgtctgcgtgctggagggcccttggcttctgagactgggcgagctgaggagggcaaaggcctgtgtggtgtttgtcccaacagagggttatggtgtgacaaggaggagcatcccaaagtcagatggcccctactgctgtcccaggaggacactactttgggctcaaaagttgtcagaatatattatcttaggctccgccaaggatatgaaatgaatattagctgctgctgctttgaaaggctgtcattttggtttttgccctggttcagttccttctgattttattcaaggttgaaaagctccttggaacacacacacacacacacacacacacacacacacacacacacacactttaaagggagaagcgcaggtctgtgtctcagccccaggtgtgctgccctccccgcagaccgtggtggctgctctgccaggcgaggttgcacgtgggagctgggctgcagtgaggagggcaccatgctgaggagtggagagggagatggaacaggaggggactgggtccctctgtgcaggggccatcgaagtccttgcgctgccaccctggggggagacacgtgccctccaagaccctgctcacaggcatgcacatgcactgtgtccacacacagacttgcagctcagaagtggggttcacagacagcacgggcctggagacatgctgcatgcttcccttccgtgttgttctgtttcatcccatttcatttttcaaaaaatgctgctcacagactgtgaattgatttgccggtcccttggagggtcatggctgggtctgaagacccctgtgctagtggagcagagagcaccccagcatgtgggagtgcagtgagccactaagccagggcatcttctcctgaacactcactctgtgctgcactcagccttgcccgcctcagagaccctcccagatgcacctttccgaggcctcagtctcagcctctggcgtggatgctgtgctcttctgcatttagtccagcaagagattgccttgaaatatgaatgatgaaattttaaaaggtaaagcatatattaggtgcaaattggattgttaaattcttttttttttttttttgagacagggtctcactctgccacccaggctggagtgcagtggtgtgatcacggctcactgcagccttgattttcttccagcaggaagggactgggtccctctgtgcaggagccatcagagtcccagctacttagggggctcaagcgatcctcctgcctcagccccccaagtagctggagctataggcacacaccaccacacccagctaatttttgtattttttgtagtggcagtgtcttgccatgttgcccaggctggtctcgaactcctgagctcaagtgatcctcctttctaggcctcctaaattctgggattacaggcatgagtcacgatgcccagctgattattaaattcttaattcatttatttatatttcttctctttgtattgaaaacatttagtgcatttgagcaccttgcaggcctttggtccgtttttttaggaacatcaagtggtgattgaatagtttttatgttcaaggtagaaaattttgtcagtggctgaaaatgaaaaatgtatattacagtatattactgtaaaccaatagaatttggaaattatgtgttttaataattccttttgtctagtgttactaacaataaaccttaataaaggttagattcctcatgtgacactactcatataaataatttaaaactttcaaaacattcatttcaaaatatccgtgaatgtgggtggcccagacagactgcctgcagaggagcagttgagtccttgtcagctgagctgccgcgttcaagagacccaccgaggagcagaggttgtgtggacttaagttacattttaaaatacttcgtcagtttctttaaaacagaaatgtgtttacttgagtgtaaattccaattctggaggcatgttatagaaatttttagagctgtttaattacggtatatgtttaaattgtaagcaccgaaaagtgctgacttactggggtctttttccatgggtggctttgtttttgtggctgtactttttttgtaagtataatgtgtatatatggaaatttgggaagaatccaagaagtataggccaatgaaaacaagttattaatacaaatagtactgtatatgagagtacacattaggaatgctgtgctttaatgcataaacatgtttacagtggtccacatgtgccaggagatgtgggaatggctacccctgaagtcatatggagaaatggggtcctcatcgcacaccatacacaaacatcatctcacaaatggattaaagacacttaagacctgaaaccaaaaaaactcctaggagaaaacacaggggaaagctccatgacatcagtttcggcgatgatttttttttggacatgacactaaaagaacaagcaacaaaactaaaagtaaacaggtgggattacattgaagtaaaaagtttctgcacaacaaaggaaacaaccaacaaaatgaaaaacgaacctgtgaatgggagaaaatacttgcaaactgtatatccagtaaggggttaatatccaaatacataaggaactcatacaactcagtggcaaaaaccaaataacccaattgaaaaatggcaaagagccatagtagacatttttccagagaagctctacagatggccaacaggtatatgcagaggtctcagcatcacccatcaccagagaaatgcagtcacaacagtgagctgtcactgcatgtctgtagaatggttgttatcagaaaggcaaaagataacaagtgtgggtgaggataggagaagagggaacccttgcactgttggtgggaatgtaaattgtacagccattgtggaaaacagcatggaggttccttgaaaaattaaatatggaactaccatatgatccactactgggtatatctccagaggaaataaaatcagtctctcatagttgtgctcccatgttcatggaagtgttaatcacaatagctaagatatgaaaacctaagggataaaggaaatgtgcgatgtgtgtgtgtgtgtgtgtgtgtgtgtgtgtgtgtgtgtgtttagagagagaatgagaatagcatattctgccttaaaggaactcctgccatttgcaacaacatggatgaagccaaacatgtgtggcttcacttacatgtggactctaaaaacattgaattcatggacgcagagagtagattggtgcttaccagtgcctggcggtagtggtggagagatgttggacacaggatacagacttccaattataagatgaataagttctagagacctgatgtacagcttggtggttgtagttaataatgctgcatttattgtatgcttgaaatttgctaagagagtaaatcttaatttgctaagagaatagattctcaccacacacaaaaaaggcaactaagtgaggtggtggaggtacatgttaattcacttgattgtgataatcatattacagtgtatacatatattaaaatatcatatcacatacattaaataaaaatttaatattacctgttgtattagtctgttctcgtgctgctatgaagaaatacttgagactgggtaatttttaaaggaaagaggtttgattaactcacagtttcacatggctggggaggcctcagggaacttacaatcatgatagaaggggaagcaaccatgtccttcttcatatggcagtaggagagagaagtgccaagcaaaagggggaaagccccttataaaaccgtcagctgtcatgagaactcactcactatcaccagggggtaactgcccccatgattcaattacctcccactgactccctcccatgacacatggggattatgggaactacaattcaagattaggtttgggtggtgacatagcgaaactgcatcgttccacccctgacccctccaaaatctcatatcctcacattttgaaacacaatcatgcccttccaacagttcccccaaagtcttaactcattctagcattaactcaaaagtccaagtccaaagtcttatctgagacaaggcaagtcccttctgtctatgagcctataaaatcaaaagcaagttagttgcttccaggatacaatcggattacaggtattgggtctatatccccattccaaatgggagaaattggccataacaaaggggctgcaggccccatgcaagtccaaaatgcaatagggcagtcattaaaccaaaatgatctcctttgactcccatgtcccacatccagggcatgctgatgcaagaggtgggctcccacggccttgggcatctctgcctctttggctttgcagggtacacttcccctccaagctgctttcacgggttggcattgagcgtctgcagcttttccaggtgcatgatgcaagctgttggtggatctaccattttgaggtgtggaggagggtggccctcttctcccagctccactaggcagtgtcccagtggggactctgtgtggggactctaaccccacatttccctttcacactgccctagcagaggttctgcacgagggccccacccctgcagctaacttctacttggacatccaggcatttccatgcatcctctgaaatctaggcagaggttcccaaacctcaattcttgacttctttgcccaataccacatgtaagctgccaaggcttgaggctttcaccctctgaagcaatggcctgagctctacgttagccccttttatccatggctggagctgaagcagctgggattcagggcaccatgtcctgaggttgcatagagcagggaggccttgggtccagcccaggaaacaatttttccctcctcggcctccaggcctgtgatgagaggggctgccccaaaggtctctgatgtgccctggagacattttcatcattgtctcagtgattaacatttggctccttattacttatgcaaatttatgcagcaggcttgaatttctccccagaaaattttttcttcttttctgtcacatcgtcaggctgcaaatttttcaaacttttatgttctgcttcctcttgaatgctttgctgcttagaaatttcttctgcatgacaccctaaatcatctctcttacgttcaaagttccgcagatatctagggcagggacaaagtgccatcagtctctttgctaaagcatagcaggagtgaccattactctacttcccaacaagttcctcatctctgtctgagaccatctcagcctggacttcgttgtccatatcactgtcagcattttggtcaaagccattcaacagatctctaggaagttcaaactttcacacatatttctgtcttcttctgagccctccaaacagttccaacctctgcctgttacccagttccaaagtcacttgcacattttcagatatctttacggcagcaccctacttctggtagcaatttactatattagtccgttatcatgctgctgtgaagaaatacctgggactgggtaatttataaaggaaatgggtttaattgactcacagttccacatggctagggaggcctccgggaacttacaatcatggcagaagggaaagcaaacacgtccttcttcacatggtggcagtagagagaagtgctgagcaaaagagggactaaccccttataaaaccgtcagatcttgtgagaactcactatcacaacagcatgagggtaactgttcccatgattcagttacctcccaactgggtgcctcccacaacacgggattattggaactacaagatgagatttcggtggggacacaacaaaaccatatcacctggacatcaaactgctgtcctccaagttttcatactttcagagaaattggtcatgacttttcctgacaagattacttaatttgcaaagagatcatttataattaccatgaatcttactgcttttgtttaatgaatatacctgggagtgagagagctgtgcactgtgtaaactggggtccagccacctgtatgtgaaggccagaggcttccctgccagcacccagcaccactttgtacaccacaaagttttatttgtcaaaaaatagtcgtaacgtcaccgttcaagggcggttgactgctgttagctttggatattgttcctttgtggctagttacgtcttttcagtatttaagagtgtattttcacagatcttacattttaaagaaaattttacatatttgtgattataccatgatatcattttgcattattttttccacttgcattgatgacataacttctaaaagttcttgtcagagatataatgtccctttttgaaatgaagaaaggaaccgcaaggtgccctctccttccctgcccttcctgatgctgagacaagccctcagtccctctgcctcctcctcagctccactcctgagcacagacaagcccagccgtggcctggaagcgacactgatgattagtatatctgtgctgagtgccgactggatgctgtgctgagccactgtggtgggtgtcttgattcctgtgaccaccttgggagatcaacatcatgggatccactgaaaagtcttgctggcttgcattagtcctgctcacagcaccatttgtaggtgacggtcttcaggagttctccacagtcgtttttgaatctcagatcctgaggagaccacctcagttctctgctgctctctctctctcctccttattttctctgcccatccctctgtactgtggtcagtgtaattgttttcagttccatcttccagttcccaaatcctctcttcaactgcctaatctctgtttagccttcctattgaatctttaacttcacttactgtattttcactgtcggacattccatatggttctgtttccgacctgcactgtgctcgtgttctgcttcagcctttgtttctcgacagcttcacagatggttactcaacgctctgcattagattgttcccatgtctgagactctgctcattgttgtctctgctgatacccactcatgctgggcttctccttgggtttttcatagtgaactcatattcgagtgggctcactatctggaactcctgagggcccctgttgggctgttttctttctggaaggatttgcattaatatatgtggcttccaggagtgttgcacctaggacaacactactccccgagggccatggctgagctggatggaggatctcaggttgaggggacaaccgtgctgtggctgaggctcactgcgggctacccggccctagtggcattggcattttctaactgcttccccctctgttccttcctcgtctcttttcagggatttccctttactctttttggagtagcggtatattaaaaagcatgtttgggtggggcatggaggctcacacctgtaatcctagcactttgagaggtcaaggtgggaggattgcttgaggccaggaattcaagaccagcctgggcaacagaatgagaccccatctctacaaaaaatacacaaagtagctgagcatgttggtgaactcctggatcccagctacttaggaggctgacatgggaggattgctcaaacccaggaggattgaggctgcaatgagccatcattatgccactgtactctatcctggtgacagagcgagactgtcaaaaaaaaaaagtatgtgtatctctctactgtctttaaaataattttttccataaatttaaagctgtttgaaaaggtaaagtttacttttaaaacagctctacactttacctgcatccgtgcactgtcttagagcctcccagaggctctggtctagccctacgtgcccgcagcctgtgcccatcacaggagcagcgatggcccatgcccatattctttggcctctcagtgggcatcacacactccctggccaccttctccttcagtctgtttggcctctgggacactcctctctcctggttctcaagtttcagctaatttgggggatgtaaatgctgcgtgtatagaggttttctagagcactttgttcggcctgccagattctgagaattgaattttactcatgagcgtgacatgaagtgaaacacctccttcatatttatgaagtttacattttatgatttatctttcagatcttattgacagcatttctgattttgtgtatggccttgtggattttcttctcataatctcaaaggtatagattgcctgtgatattatttatttattttaagacggagtctcactctctcacccaggctggagtgtagtggcacgatctcggctcattgcaacctctacctcccgggttcaagcgattctcctgcctcagcctcccgagtagctgggattataggcatctgcttccacgctcggctaatttttatattttagtagagacgaggtctcttcatgttgaccaggctggtctcgaactcctgacctcaggtgatccactcacctcggcttcccaaagtgctgggattacaggtgtgagccactgcgcccagccttcctgtgatattatttagattgcgacatgattgtggatgatttattgcgggcatggaaggaatgacagccttccaaaatgtgtatgtcagcatctgtgacgtggctgccccagagcctctgataaaaaccagttcctgcggctgagggccaagggccacatggtggcttcaggggtgtgtgctctttccccttcctggccaatgagaggacagtgaagagatggatgcaggctgctgtgtgttttcactactgggaagtgggttggggggcaggaccctccgaagctggccccaggtggtctcacacagtgcctgtcagggggcttactttgggtgccagaggacagactctgcgggggaggaggatgcgcatagctggtgtaggtcgcagggccagggctggcagtggaccccggatggccaggctgcgtcggggcatggttgcccttgccggcaggctgggaggcagggctggggccctgtgccgaggttggggtggtcagacaggatgtgcagaattccagtgggtgtaccgctcgtgttaaaacccatacagtgtgtgtcccggagggccacacggtaggggcagcagctggaagccctggctccttttccttggtcccctcccccttgggaggttcctctgggcctcacttgtttggactttggcgtgggggggtcttaaagccccagtgacctccacttctcgggagtggccaggaggtaccaggttgcccatcacggcagcaccttctcgttcgctcccctggccctggcagccctcgccttggcagagaggaggacagaagtgggtccttgccaggccgtctgggaggtccccgcaggaaggggttcctgcctagatagcagcagagtgcctgcccagggatcagatcaaacacgggtttgtccagcctctggagctccattctgctcaccccctctcacttcctggcatccgtgtcccctggtgagccagcctcttctgattcctctccttcctgggctgagtcctgggcttgtcccgtacctgcctgacggctctgcgccctgggcccttcctgccagtgcagtgccaggtcgccctgatcagggctcccgttggggccgccgtggcttcctgttcttttcggcttcctcctggctcagctgactgtctcgagttctcggcctcctcctggtcacgctggccttccggtaccgcctgccacccctccttcataacttgacttgtctgttcttgtccctggtgcctttaagccagccaccctgctctcctccagccccttccactgttccaagccccttcctcggaggcgtctccccaaccctcctgctggtggccgctcttgcactgcttgggtgggcgggcaccagatccggggcttggctctgggcttgactcctctgctgccaccctgagtggtcattgcgcctctctaggccccgttccactcctgtgggagggcagtgatgctggagagcgtgaggggcggcgagtatggccctgggtggcgtcatggcacacaggcactgagtggactgttggtggctgcccccgagtgtggtcctgggtggcgtcacggcacgtgggcactgagtgggctgttggtggctgcccccagtgtgtgtgtcacttacagggcatgatgctactgaagtttgtgaagttggtttcattgacgctgttactaagactgtaatgtcagacatgttgggatctgttcttttcacatgaaaaggatgacttcctcttgttgggtgtcacctagtttgggcggagtgggagccgtgactcttgactcattgggccgtctggctttcccgggacacctccacctggagagtgcctctgagaacctcccagagtctgccccttgtgttcctcagatggacttttcgtttcctggagttttgtcatgaggcttaattaactcatgtctctctctcttttctttcagtctgcaactgtgtctgatggcggtaagtcacaatttctgatgtatatattttttatttttcataaagttttcaaattgtgaaagtgtatttgccatttgatgccctcaggaaggacgggttgtttgcctttccctgtctccttgtgggcgggttctaggtgagttaattctgggggcgctttctgtgacacccaggtggcctcggcgtgtgttttggaagctgtttgttaagagaactgccatggccctgaacaccagtgtgatagagcgctgtgtgtctgaggagtgcacccacccgcctgcctgtgtctgacaagttaaaacgtgtttttgctcttcccttgttgtataaccagcttttaaaccagcaagttaagatttcaaagtgctttctgaatttgagcaattcaggaaatttgggtgagacccagaattttctcaagaaaagtataatagacgaattgagagtgtgggatgaagaggaatcaaaaacttactttctgtgtttaaagaattttgtgcacagggattcttttcatggactgattgaaaaggaagtaggcaggaatgtcttatttcactgaagatttctctgatgtcatccttatcattttggttcaatgatttaaaaaaacctctccaaagtaaggagagttcctccgaaatattcctcttttcttctaacactcctgacagtccgcaggctctcgggtttcatcgtcacctcacgcttttgtccccacttctgtccctgagagctggaataggtgcacctggcatcgctgtgggccagggatgggctgaggcacaggctgtgctgcagaagctgcccaggggccggtgggtttgaggtgccactgtatttgtgcgttaaagagaaaccaaatgtcgttctctcactttctgtggtcctgcagctgctggcctcagtcctcggcctcggaaagggctgctgtccccaggtaggcagacagagctcagagccctcgcaggccagccactctgtaggaaggccaggaggaccccaggtgggcagacagagctcagagcccttgtgggccagcggctctgtaggaggaggagcatatcttgggttacacacgcactggcacctgaagccgagaccagagggatcccgacactcgtgtggtggagatgtattttgtagaataaaaggaattctatttcctattttatgtacaatgaaaatcatgtcatttaatcagtcttaaggtggagggaggataaacttccttaatgaaaagaaacaggacccggaaccaaatccaggataaagtgaccggtgttttgaatgatctgttcatgctttctctttctgccgtgttctcacttctcctttctggcagaagacattcatttcttgcaggcaatttatacatgaaagatttgcctaatatgtttagtttcaccatatataataagttttatttgcctccaaaagattgcttctgtcagcaatagatgcaggaacccagagttgtgttatgtgtccattttacagttgtttaaaaacctgcacctcccaagggtgggaagtctctagctcctcgccgtgctggctctgtgtgtccctctgaggaagtgtgtcctggctcctcgccacgctggctctgtgtgtccctctgaggaagtgtatcctggccacgcagagatcccctggtgctagggctttccaccccctgctcctccttcttttcccagtgtcagaccctggggccactgggacaggcccgtccctccatggagagccccagtcacagaggaggagacgggagggaggaggagacgggagggaggaggagacgggagggaggaggagacgggagggaggagacagtcatcagcacaccctgaatttcaggaaccgcagtgggcgggctggatgtttatttagttcctttttgtgtttttgttatttttccatcttcagtttctttgcttataagagtaaaaagagccagttatcttgtttaatgtgcacatgagctctagatcggtgtcacattctgccgttgttagatgtagggcaccgaggcagagtggggagatccagcagctcacagtagtctgcaggtgagatggccagactcaggcctgcaggggaaagccctggctgagaggcccctccaccctggctcccacccaccccccagccctgggcctccacacgcccagccccatggtcctggagagtcccccgctccagccctggaccctccagcgcctgcagcccctgctgccccttctggtgcctcaggcagaaagaggccccctcccccacaccctgccctccacggcagtgacaggagcctgggcggggtcggggtgggggggtggtcccagggaaactctggctgtgtttccacacagagatctttttataggctgtggtcagtgggagactcagtgcactgaggtgggcctgggaactccagcaccccagtgtttttatgggaaaaatgctccccgagttccaaggagggactgaggagttggcttggggagcaatctgctcagctgggctgtctctgcctggtcatcctgtctagttttggtgattaatagatcactcacttagaaatattttgtgttcaacgagccgtgccagtgagagagttcgtgttcatgccacggtttcattctgtgacgcgtatcgtgcttttatagcttaggctctcgctggagagttttagttttgtggctcggttttaaggaagttggactatgctattttggcaatctttgtcaagttggagtgtgttttttcactttttcagaagaaaggggctgataatggccacccgtttgtagccaaagagtgccctcgggaaaaagggttacagctggtctctggggggcacggcagggctgtgggtgggggcagggagcagattccagctggagagaaggaagcacattctagcattatagagaggcttagcaggggaatggtctgccttgtgggaagttattcagacagaagtgtgaggtcgagctggagggagatggggcgttgtgaagaaatgagaaaaggaagatgcccggttgctcctggaaaaaggaacctctcacctctcctggtctggctctgcacagagctggagccgcggccgcacagaagcccgttcttgtggcttcctccgttggtcaagctctgtgccaagaggcctgccagaatcccctcacccactgcagcctccacaggtggatgttcccgctgtgaccacctcaccttctgaagtcggggtgtggagactatcggggagctcccagagcgcccacctcctcctgcgtacggcgtctgtgccagcaggaaagccggggaactgtgcggctctggctttgggggacggtggcaggtccacatgacaccccacatacatgaccccggtgctccagctgcttctcaaacactccgttctcgcagcctcaccctggggacccccgacacgtactagtcgcagtcctccatccccatgtcctcctcatgccttgtgcctcagctctgccctgaccccactctgtccactcagctgcccccctactcgtcctccatgcagacctcagtcttggccctgtctctgcagccatcctcccgctcccttctcctgaacgctggtggttgcccccacagcagcagcagtgatctgcccagcccctgcactggacccctccaccagctcagagcccctgttcccccaaccatcctgcgtcccaccctggtctccaatggtgcctcaggcacatgcggtttccctcttcccttcctgaccacctgcccccatcctgagcgatggccactgtcaatttcctgcccgtgctaggggcagcttccatcattttaattattcatctgtgttggtgcttttgtccccccagctggtgtgacctccacgtggcaggtcagagttgtcccggcacccggcacagcggctggcacgagagctgtctgttgagtgaatgatcgggtgttcagcagacatcagccagagcgtcagggcgaggcttgggcggggacagtggctttcagtgattttccttttagtcgtgaaaccttctcaaaaagcacacacaagcacagaagcagaaactcctgtgtgactggtgttgcggggtggacccactgccgccgcctcctcctgggctgctctgcgcgcctgccaggctcttccagtgccttcacccaacacgcgggcctttggagctcagacctggccatggcggaagattcgggctccacctgcagctccacagctgacaggccgatctcttggggcaagtcactttctctctcctagccttgtgtcttcatctcgccggtccttgttagcgaacaggcactgaggcctggggagctgtcacaaacggctgcctgatgggggagggttaccgtaattgccggattaacttgggggactttaaactgcattcctctttaaaatataaagtataattgttgatatttttggcaaatgccaaaatttgtattctatacaattttgaaagagaaagggaaaagcttgagagtagaaccatcagtacttacatagaattagttgataaatttacattttcctcatcagaaaaacagtgcagcctaattgcacattttccaaaaatgtttgctaaatagcagaaacagaatgttaatttgtaatgcgctattgtgggagtggttgttttaaccagaaccctttacttgatttaatatgtcacattcttttggtttgcttttggacttcaaaatgatgctcagaatcacacagtgtatttgtagggtgtggaataccgtattagtatttgtaaacaggagtcagactggagattttcagttttggaagtgtggagacttgatttctgccaggatgccttccgatgtacttgtttctttccaattctacaagatatttggagagtttttattactagtttttaatattgtgaaattattttttcaagcaaacaaattcaaaggtaataaaaccactaactgcatacctatcttccagagttaacgtgtgctagccagggggcctgtgcctgagaattgactcagggctggggtgaccacagaagcccttggtgcccctgcggctgcatcccctccccagaggccacacttggaagcaggcgccaccccttcccactccaagggagtttcttagttagattcttggggaaaagataaaacaaacgaagaactcctctcatgcaaccctaggcgtgagaagcagtgtccgccctgtttggtggtctggaggccatgtcagagagggctgcctggcgtgtttgggggcctcgtcagagagggctgcctggggtgtttgggggcctcaccagagagggctgcctggggtgtttgggggcgtcagagagggctgcctgggtgctccagggaagctcctcctgctcagcttctcggtctgggaggatgttcacctgcaaaactccaccaagccatatgctcataatctgtgcacttttctgtatatcttaatagtttactaaaataattaatattttaaatttctggaacttttaacctaaggactttcaaaatggtctgaaaatgttaatagatttgctctcaggagagtatgtatgaagtttgcagaaagaaagcattatgtagattggattgaaaatcagattggccaaaatgatttaaggaaaaggtctagaagtagatcctgagtgtggggagagctcaagggcttttctcagggacaggacctgtgcagttttatgcagttgaggaagatccttcccctacccccaggctagatagactgtgggaagagatcccctctgggcataccacctaacagaaagcttttaagactttctccttattgtcggttttcagcaatttgattatgatgagtctcaggttggtttttctgtgtctgttgtgtttgggatttgttggggttcaggtatttttttcattgtttcccacttttgagactctaattatgcaagcatgttaggccacctggttttcccttcagctcatggaggccgtttcatgttcaggcttctgtgtcgcctgcatgcttgccatttcattgtttctcttgctctatcctgcagttcactgatctgtcattttagtgtcagatatacagctcattccctcctgtgagggaattcctgccgatcagcctgtcatctcagagactgtgttttcatctttagcagttccttctatttttttcatttctttctactgattctcttcacgctttgctttaaaaccccaaaaatgttggctgggtgcagtggttcatgcctgtaatcccagcactttgggaggctgaggtgggcggatcagctgaggtcaggagttcaagaccaccccggccaacatggtgaaaccccgtgtctaataaaaatataaaaatagctgggcatggtggcagatgcctgtaatcccagctactcgggaggctgaggcaggagaatctcttgaactcaggaggcagaggttgtagtgagctgagatggtgccactgcactccagcctgggggcagagtgagactgtctcaaaacaaaaacaaaaaaccccaaaatgtttgtatatttataagacatgtaaagcccttagatgccagtgctatcatctctgtctttctgggtccctttattgactgacttttctcctggttatgggttacatttttctgagtattcatttgtctggcagttcttgactgagtgctgaattttgttgccttcctttaaaaaatacagaggtttgtaaagctacatttggggactcctctaaaagctggggattcacccagaactggctggaactcgggaaccccctgaccctgtgtgagttctggcagctgttcccgccgcagcccccggctgatctttgcctgcctcgtggggtctcggctgtgcatgcacagcttagaactcagccacaggtggaggctcctgtgaggtccctgggcactttccctgctaggtctctcctgcacctgcagctccagccaccctggccttccccgattctgacctgtctcctcagctctggacggtggttctacctgggccccaccttgtgctgtggttcatggagtgcctctgggctgacagctctgggtggtcacagggctcaccttattaattttttcatcaggaattacaccccttctggtgactgtggtccaattttgggaactgttgcttcgcatattttgcttttcttttttctgtcttttcccgcaggttctgatgctctgcgtattttgtctactattctactgtctggcaggaggggaaggcctgtcccaggtgctctcccacggcagatagagttctgtgatataatttttttcaccttacttgtgggatgtggtctgtaaagttcagaacaaaactcaggtcatgacggcaccttgtacaaagagcttcactgatttcccaaaagctgcctcacaacccagaaagagcaggttctcctctccccaggcccgtccctggagcatctgaggccagcaccatgctgggtctatggggaaatggctggaatttggggaggaagctgcccagcccaggttggacttggcctggctggctccctaggtgaagtgcagagaccaagcctctgcccggccctcagagcacctgcgactgacccttcctgccggcatctctctgaacgtggtgcccttccacggcatttcatccgtctgctccttcagcacatcttttttttttttcttttttgagacagagtctcgctctgtcacccaggctagagtacagtggtgcaatcttgactcactacaacctctgcctcttgggttcaagtgattcttgtgcctcagtctctcaagtagctggtattgcagatgtacaccaccacgcctggctaatttttgtatttttagtagagatggtgtttcaccatgttgcccaggctggtctcgaactcctgacctcaggtgatagacccaccttggcctcccaaagtggtgggattacaggcgtgagctaccatgctcagccgaatatgtgaaatgtaaataacaaatctagaaaggaatgtaggtaacaaatatctaatgagaatactctattaggaattgcattttatattaaatgatactgatgtagaaaggtggctctattctgctcacatttcgtgacactatttaaacacttcagatgcatttttgttgcaattgtttttcaagtaatgaaaactttttattgaagaatagcttacacgctgaaaggtacatacatgatcaataagcaatttgagagattttcacagaatgaacacatgtgtgttatcagcactcagaccaagagacagaacattaccagcagcccaagcgcccctgcaggccctcagtcaccagctccggaagggacctctcacccgacggctgttgcctgttttcaaacttaaaaaaaaaagaagactgactgggcacagtggttcacatctgtaatcccagcactttgggaggccgagacaggtggattccttgaggccaagagttcaagaccagcctggccaatatggcaaaaccccgtctctaccaaaaatacaaaaaaacaaaacaaaacaaaaaaaaacattagctggatgtggtggcgcatgcctgtaatcccagctactagggtagctgaggcaggagaatctcttgaacctgggaggtgaaggttatagtaggcagaggttgcagtgagcagagtttgcgccactgcactccagcctgggtaacagagtgagagtccatctaaaaaaaaaaaaaaagactcaacgcagcgtatgctgtttagtgtctagcttcctttatttaacataggatggtgcattttgctcctgtgagtctatcaggagctgtttactctcctagctgtggactgtccatggtgcaaatatggcatcgttcctccattcttctcttgatgacatcgtgttggttctgacttttggccgttacagatggtgccatataacatgcttgtacaggtcttttgggtgggcatctgcatacatttctgctctgataggctgggggtttgtatatattcacctatagtaaatactgccaatttccaaatgatttttacagtgtccacattgactagcagtatataagaattctaggtgttcaacatcctctcaacactttccctgtagccacatacatagggctttaattgtattaatagttttagttctcagtcccctgatgactatgaattgatcaccttttcatatatttttggccctttgaatatcttattttgtgaagtgcttgttcaagacttttgcttatttttctgttaggttatctgcctttccttattgatttatagaatattttaaaaatatattctggaaatgattttatggtggatttacgtatagttttcccttagtgtctctagggaattggttccaagaccccttgaggataccaaaatctgcagatacttgagtccctgatataaaatggtgtagcgtttgcatataacctacccataccttcctgggtactttaaatcatttctagattactgataacagctaatacaatgtaaatggtatgtaaacagttgttatactatattgtttttatttgtattttttgttgtattgttattttttttccattaattttttttccaaatattttcccaaatattttccatccacagttggttgaatctgtggatgcagaactgtgggtgcggagggctggctgtattagatataccttgtgttttggatttatgtgtttgtgatagatttatgtatgtagttaagcctttctataccttacctgttcattctcttagtggtatcttgtgatgactgaaagttcttaatataatccagtttatcatttttccccttagggtaatgcttatgtccctttagagcaggctttgcccttcccaagaccatgaaagtaaatctgttttgttttatcttcaatatttaaatctctgattcatctggaattggtatttttgtctatggtgtgaggtaggggtaagattcattttttctacatggtattcagttgtcccagctccatgtaatgaaaagacaatccttcccaataacttgaagcaacacctgtatcaggtaatcatatatttgtgggtctgtttctggcctctgtattctgttccattggtctgtttgtctatcattggatcaggacttcatgtcgtaattctcgtccctggcatttggatatctagtgctatagtcttcattttgcttgtctttaagattgccttggttattcctggcccttgcatttccttatatattttggaggcaattttcaagtcactggcagctttccagagtcatcttcacttttgtccaagctggttgagacatagcatttctggaatctgtgttgatgcttttcctggaaatgttatcacaagccacatgcagccattgacatttggacaattggggttttttttttttaattgctgtaattatacatatgtgatcttcaatatgtagttactcattcttgctctcaaagtcttgagaccattcctcccaggaataaatactaaatctggcttggtttgccttttaaaaaaccatctcttctggatgaatgacctctataagtatctaacaccagcattaatggagatgatttcaggctaatgcatcaccctcaaatagactcttgctcgaaagaaggtgagggagcagcctgggacacacaagaccttgcaaggacttgagaaaaaagggactggttgcatcagagaagccagtgggaagcccctgtgtgcctctgggtgccgaggtgggctgtggtgggatgccacactggctgcgatagaagaagaaggagctgtgcaagtgcgtggccgggccagagcccaccctgtggtcaggatggccgagcagagctgagacctgacagatgggtgaggattaaccctcatatgagtttgggaagacaggaagaaccaggaaaaagctgagatggcagccagggggtcgcgaggaacccaagagagagtagtcgtgtgtgcacatgtccatgggaggagcagtggaacgacgtgagaggggtcccaagactaacctcagggttttgcctcaggcagctcggaggatgagggtgtttgcagagatggggaagactagggtgggaggagcagataggggggtgataaccaagaattctgctttggacatgggatttttgagatgtttattcaaaatctactggagatattgtgtagacagttggataaatgagtacagaatgcagaaaagtggttgggcttgaaaatagaaatttgggagtcatcagcgtttcaatgaaactcattggcttggtaaacttgagtaattatagatcatgcagaaaaggcgagtctcaaacccataagacacatgggaaaccagaagatgctgaagatgtggtttgagaggcaataggacatagaacaattaagagtatggcctctggagccaaattatttaggtttacatcctaattctgctacttcctagctgtgggtctcatttctctcatctgtaaaatggaataatagtaggacccattacttacagacttcttacaggaagtaaatgatttaatatatgtgaagtacatcggacaatacctggtacattataaggagttatataaatgataactgccattatttgtaatggcattttaattgcattttcaatataattgaccactggaagtgaataaaattatttagagggactgggtagagaaaataagccaggaggtcctgaagaagcttacaagatcaacaagagaaagagcatcagaggagaaaaactctccactttgattgttaaaaacccaattttaaaataagcgatgttgaaccaggcacggtggtgcacacctataatcctagctgtggattatagggaatgcttgggaagctgaggcaggaggctcacttgaggccaaaagtttgagaccagcctgggcaatatagtttgactccttctgaaaacaaacaaacaaacaacaataagtgacaaaagtttgaaaacaactaaatgagaggatataacaagcaatattaagaaaaaagagaagtggcataacaatattaatatcagacaaagtgaaaaagcaataaaaagaacaaaaaagacagtgtgcaccaaaagtagcatgagatttgcagaacagaagtaaatggcacggtatcaacatgggtaagtactccgagggggaattattacacacctttttcagaaaccaagagatcaagctgaaaaaaaaaaatagtaagattacaaagtatgtgaatggaaaaatgagcaaattaaatctaacagacacatagagagctttgtaccaaatggaaaatacactttttttctaaagtacgtggaacatttactaaagttgtggcatacaatatgccacacatgcagttgctacaaatttaaaaaaattatagcatacagagaatagctcctgacagcagtgtatttgaatagaagtcgatcataaaatgataacaaaaaagaattcatacattttaaagtttaaaaccatacttctaaataatccatgggtcaaggaagaaattaaaatgggagttatcatacagtttagaaccatttatggttctatactacacatcatcaccagtagaatataatcaaagtgattttcagtgaaaaaattgtagcattaaatgtatatattagaaaaaagtttgaaaatataggaaataagttttcaacagaagcaagtacggaaaaaaggaaatgcaaattaaggaaatgaagataaatgcagaaattatcaaaatagaaaaaaccaaacagtatacaactaaaagtatgaacaaaagtataatcaagaaaaagagggaggccaggcacagtggcttatgcctgtaatctcagcactttgggaggctgatgcaggaggatcacttgggcccaggaatttgagaccagcctggacaaaacaccatctctacaaaaaaagaaaaagaggaagaggacaaagataacatcaagaatgaaagacaggtcctaagtacagttagagactaagaagtaacactataggacaattccattaacaactttatactgtacatttgattaaccggacaatctttaggaaaatataaatgatcaaagttggcctaagaagaagtagaaactgattagataaatcaacataggcaaaaatgatttggaagtcaaagatcaaaacccccataggcaccatgcccaaaccaatatacagatgagtatatcagtcagcttaggctaagtaatattgcaataacaaataacaccaaaaatcctggtgggtttaacaaagcagatgttcatttcttacactacattacatgcctactgcagtttggctttgtttttgttctaagtgttttcctccaggagccaggctattggagcgcttcctaaatggggcactgcaggccttgtggccgagggaaaagacggcagggcagaatcaggtcatggctctcagccatactgtttcacattcattggccaaagcataacacatggtttgcctgacgtcagtacacagggcttgaatgatcttccacaagggggggcaacaaacatttccaacttaatattgtctttacacagggcatagaagatgggaagcttctcacctcagtttgcaagactggcatattcctgataccaatattggagaaagatggcacaggaaaattgaattattggccagtttcacttatgagtaaatatagaagtttgtaaataaaataattagcaaatcaaatccagtagcattttttaatgcatccttgtgaagtttggtttacacaagaaatgcaaagatagttcacccttagggaattttccattcatcccaccattcattcaacagtgatttttgtggggctctcacttttcttcaaaaaactcttctaggaactagggatacattggtgaacaaaacaacggattgtgttacattaatagattaaaggacgaaaatcatattattaccacactggaggccaaaggagcatctaatagaattactgataaaaagcactcattccttttttaaaaagttatacttaatagaatacatgaatgtactctattaattattatatattatatattctattagtaatagtattagttttagtaatactaactactagctagtattactattagaattagtattagtattagtaatactaattgcttattagtattagtaatactcattagtaatactcattagtattaataattagtaatagaatatatatgataatgaatagaaaaagcactcattccttttttacaaagttatacttaatagaatacatataataataattatactattagtaatagtatatatattagaaaaattcctattagagccaggaataggcaaggatgttctctatctcagcaactgttttaacattgtattgagattctggccagcactacatggcaagaaaaaaatattaaacttgggaagaaaaaagataatcatcatttacaaataatattattatctaactattatacaaaaccgaaagcatagcccatggccaggtccaacttttaaacctggcagagttcagtgagatcaaccctggcggctttcctaagcaaaacacatgatttccatgggagcatatgtatgttggtaaaaatgctttaaaaattcgacagaccaacaccaaattaataagatggattatctttggggagggggtataggaccagaattttaggtgataagcccaatagggattttagatttatatttacattttttcaaggaagaaaatattttatgaattatgcattataatgtcagtttatatccctttcagcctgtagtctctcattagctgttacttgggacaagcaatccacttagtcagacgatgttattggatgcctaggatgtgcctcgcactgtttgtcacagtgttcctttcatgtcagcatagacgcatagttattatcccagctttataggaaagttaagtaactcgtaagttacttggtgaggaggggagttctcacgctgtccctgtgaagtccgagcacggtttttactgcggttttacagcggggggagtgtcttgcccagtgaggaaggagcggagctctgagtcagatccaaacagtgtgactctggaaccacgccgtgaaccggcacactgtggactaggtaacaccaggctgaggatccacctcctagaatacagcttgccatagagcagacatcccgtcagcacctgtgaatcgtgagaaggaggcggtggcctcatttaccgcatgctcaccttaaacttgcccacccggttttaggaagagaatgggcagaatggctgggttccccatggaggagagccctgccttagcctcgtctcttgctgcgtaaaagtccagggctttgcagagcctctccacagtcagcaaggagaagcagtctccagaggtggccccctgagccccagctccacccctgggaaggggccagaccacaggcagcaggccctggagcccgtgagcgctgcctacctccctgggccagtggacatgggaccagcatggtgaccagatttttggaagcccggtttaggacaaatgactttttaagtttgattgtttgatatcagaagttatataaaaggtacaaacattgcattatgcttagttttacatctaacatattatatttattattaaaattatgtgaagtcatcacagtcccagcaaataccatttatatggccaccatggctgagagcatccaccatctgcccctgatgtgtagagtaggccttttttccgtgtcttgtgttacctctttttggcttatggggtggcctctaaatgtcacaaatcctttatgcttttacacactcaggcccttcctccttccctgaagcctggtcctctggcctcagtcctgctgggtagggtgccctttcgtcctctctatccctggactctttcagtggaagcacaggtccccaggactgtgtcttcagttttctgtgtgggtggccccaccttggcttgagggaagggtttaggaccacttttgagtcttcctcatgaggtcagcatttggggcccctgggcttctgcattgggtggcgtcctctgcgttgggtggcgtcctctgcgttgggtggtgtcctctggtggggccaagccacaaccagaaggtctgaacttcctgtgtggccactggcacaagaatagaagaagaatgtctttacaaagtataaatattttattcatcaaaatgaagtaagtcagtttcacaaaggaattaaccactaaatgagtaatgtgaagttttttcagctcaagtaagcataataaatgaagtcagttagggttgatctttgaaaaatgttctgtgtcttttcttggagcatcctgagggctccctgtggtcagatgtgacctcaccaactacttatggtcatagttggtagctctaagcctagaatcctaaaaattcagagtgacaagtgacataattcactcgtctttgcacatcgcctaacacttcccacactgaccttcgcaggagccgctctgctcactcgcatggcctcatgggctctggcagcatttcacccccgcctgttggcatttcactctccagaaggacttggtgtcacttcagacgtagagagtttgttttgctgggctctgccagaatagttataaatcacacgtttctagtactgactccaggaaagacccagaattcagatttctcctgtttgggcccacatttcttctggccctctgaggtaacgggaagtacactatatctcgaggggtccgtgagacctgccaggcgtggcagctcctctgcagggctgtgaggtctggctgtgggggccagactcacggtcagcccagaaagtgctgctggggataccgggacctcaccatggagaatgtggagtctgggcccagcatagtcactgatgtcagcccaggcaggtcatggaatgttttggacctcagcagcttcatctgtaaaatgggctgattgactgagatcgatagcatgtaaacacttttctgaggaggtgctattccagatccctgttttctaaccctcagcaggctctgctgttgtggcaggcttttgttgagatgcagagctgggccggcctccgcagcctgtgctgcttaaagcagagggggcctgagcctaccctacctgttcttgcccgacatgtcctccttcctccgcaagccagcccctcacagggattcccgtaagatttctctgggaagaaaggcctcattgctttaagtttgaaaagcatcttccagttgataactggggaatgaaatagatactctgagacccaaagggggctattgacgtggggtgatgtgacaaaatgtggatacaaaatttcacaccccagtatgaggctggggtgaagctaagggagtaaggagggggctatgggctgtggcagccctccctgcactaccacacttctgtgcagaacttaggttccagaattctaaattaaacctggccttccaggttgttggagggtagcgagatggcatatagcttatttaacaatgtgttagcctttgttacaattttccagcatttagatatatggtgtaagctccttcgtctacacttgccccaagccttgcaaagattagttctcttccatgagaaaaccaaggcacagacatgctcaaggccatgtgatcaatcacatcatggcagccagagacagaaggattgtcctgaggcacaagtctccacatggggattttctgtgaaagtgaattttgccgctgtagtgactgcatggtaggtattcacgaggcctggctgtttcgaaagggaaacaaaatcactttggtgatcaagtgcaggctttaaacagtaggtggtaggattttaagctgggcgagtaagtaggtctgtctgtgcaggggtgtgggtcagtcgttcttaagctgctttctgtttgtgccaggcttgagcacagggacaaacacatcagagctcatgggagccagttccccactgccagcagggagttacagagatggaagaggaggtgaggatgtgctcagggtgttgggttggcattggaggcgtcagtatgaaccgatggctttcaatagagggatgtgtggatggagagatagacatagcagtgtgtgcgtgtgcatccacatttcccagctctgtccaccagggtggggctggaggcagggaaaccccagtagcagtgagcacctgcatgtccagattttggtgtctatacctcttttctgtagagggtgtcaggctctgtggagcaaagactaattcctgggctggagtgggaaaaacacaggatgaagctggagcttcgcttttattttttttcacaccagaaaataaggcagtgcttaaggcatgatgaggacacatgagcaggatacaggtgccagcctgaaggagggactgagcttccaaaaaagaaaggtgttcatggggtatgagccatggactaaaataaaaacccagcaagtccacactaacacagataaatggctttgtagtaacaggaggggggctcttagagcagaatacagctgaacagtgcgtcaggaaatcatcagagggtgctaaagttgtggactcaggcttgatgcgaagcaagacacttacagagcctcggggtagttctgcacgaagcttattatcaccagggaaccctagaaacgacagcggacaaatctggtgccccagccacatgatgagagccagcgtcacccaccctgcagtaaactgacaccacgtgcctcctcagaggaggtcccagagggacaccgcatggcttccagggcattccagccagtcacaaagaaacatcagccaagcccaaactgaggggcagtcttaaaaataaccagcctctgtcagggttggaaccacagagaggctggggaacattccagatggaaggagactgcagacacacagcagcagccaccctgagttccaccctgctctggggaaaagagctggaaaggacaggattgacgaagctggaagatggcttgttaaatttcctgattttgatgtcggtacttggttatgagagaatgtccaccttcttaggaaatctacactgacgtgtttaggggcaaagaggcatgctgtctccaacttaatctcagatagtctggaaaaaggttgcgtgtgtgcaggtgtgaacgtgtttagaggaagggagaatgggcggaagggagagggacgggatgatacagcaagcaggaagaatgcggacatttggtgaatctgggcaaacggatatgggagtcccttttattattcttataatttttctgcaagtttgaaattatttcaaaagaaaaagttgcccccccaaaaaggatggcacacattgtctaggagagggctggtttgggtgtgaacaaaggtttcctgtggcatctcggtgctcgtatgtcccggctcccccataagcacatttagctgcactgatagtgcctacatctgggcttcggccacttgcccatcttcattctcctggccctcacaacagccctgcaagcccctgccagccgcagatggacacggggactgaggcccacgggactgtggggccccgccgaggtgaccggccagaaaggagtgcagaactccggccagggcgggctcagagcctgcacccacgcctcctgcctgggccgccctgtgaatgggggagaagggcttcctgtgcctcagaaactggaggccaagaagcacatgatggacgggtgggccgaatgaggccaagctctgccttctacagcctttccaggacttttttcttggaaaatgtggagcttgattggatgcctttgtagtggagcttccatcaagttagagctgcttgtgtggcagtgtccatccgggagtcagtagatggggtcaacaaacagcgccttcagccaaaccctgccaccaaccagctttgtgtaatgaagtgtcagtgggatggccatgcccattcctgcagttgctgtcgggggccgcttctgtcctaactgcagagagtgcagtgtcctagaaaaatggagactgtgtgtcacccgccctctccagggaactttgctgggcctcacctgtggtgttagcggatgtttcctaacccttgaaccaagacccaggagatcctctcagagatgaggccctgctcggcctgggggcaggagcaacagaggtgggtgtggcaccccacctcggaaagggaccaccccatgtggtgggcaggccgcctccaggatgcccacaggttgttcagaaatgtctgtgagttggcatattttgcttggttgtaaaaatgttccttatggttcacaggtggtccagtttggtatagttgcttatttcctaactaaatacatattcctgataacacgctgtttgagtgatcacctgcttataaaaagataggttttatatttatgggactaaaaattttttaatttaagttacatgtggaaagaagagttaaaaactatacaaaaagcctacaagtacttttttttcctttgccactgcttgtttaataaagcacaaattgctgaagtggagtagcgtgttgggaggccggggttccatctgcagtgtttatgccacgtgcagtcacctagctgtgctcggcccgccttcaataattcaggctccgtggcggcagcagctgaggggctgctgtgaattatgcatgcgtcttcggcaaggcttcgtgcgacgtctcctgttggcttcccatccgtgagcctgcgtgcaggcagggcagagccgtctttgtcagccgtgtgctgggatcgcgggagaaactgcaataattggcctcctgggagtgtgagctcaggagcaatgtccctgtgtgggacgcaggcctttgctcggggccgcccgggctctgccggctgaccctggtatggactcagaggggtggtttgcagtgcatggttggaagtatttggttaagtggcatcacagtggctcttatcagctctacccaggtaaagtcccttgtccccatctgcgtaccttgtcgcgttgtcaggggcacactgacttatgtggtcttcaggtatgtttgccgcagcgggattgtgtcggggatgaggggcccataggggtgcctgtgcagtgacgtgtttcgtgatctgacttggagttatgacttaaagagtcagagtgtttgaggttacggtttggatgagataacaacgggcccgggccgtgtgttacagaactaactgcaaacttttcatcttacggtattaacatttgtaacgtaacctacatgtttgacccaccaatatatacatggcggcttttccaattagcagcaaatctaaacagactttaaactctttttcaccaggaaagcatttctttgactcagatgggtcagtcgaaagaaaaaatcccacaacaataccgtaaactggaccgtgttctctaaggtggtgttgggatgtgggctgtgttttgtggatctcttttcttctttggcttagatcacaagtgtgggtttgactcacgtgttcagcaccagagaatcaggcaagccactgcaagcaggccagtgagttacagacgtggtggcatccctcccgcgttctggccttggagctggggtcggaatggtggcttgtgcaaggaattttattttaggtgagtgctgctcagggttcaaggtcaggccttctgtgactgtgcactattttccacgtgacgagaacaactccagagcacatgaaagtgctgtgaattgtgaaatccataattgaaagtgagtgttagagaggagacgactttccgtgtgtgttgagccacgtagcaaagaaaaatggtgctcagggggctctgcctcgcacctggctctgctgtgttcctctgcaagtcacctgcatgaattttgtccagatggaatcgtaaaaattcaccaggagagcttatgattgcaagaattccgggtggacgttttccggtagccagtttttgaaaaacgtgtgtgttgctggagattccactgtcctttgcgaatcgctggactcagtgcctggactcaggagggtccacgtgcccagcaggtcccgtctgtgccctcgggaagctgaggagctgggtcatgagttttctgtcctgatccttaggcaggggtggcatgggcagccggggctgtggcccagaggcttctctttccggctcctccaggtaatgtgtctgcttcctctactctccaggctcctgtgcttgagttgaggcccccgcttgctgtggcctcacactgggaggaattactggagcacaattcctatgtcagcagaaagctacaaaatgagattgtgtgaagggggcgtggctctcacccccagcagtgctgggagcaattggcaaggtgacgcctcctgtctttgcaataccagagaagagcatggactgcaacctctttcccttccttggaaatggtttatttgcagctaaagcaactctcacttgagtgggtcctggagcctgggcaggcccaggagagggtctggcacccacaccgcccccaagccatgcctgcatctgctctctgccgtgctcctctgtacccgaggctgtgctctctcaggagggtctgccatgtggtttcctgtacacagcatctgcctctgcaggaccccaagggcaggagcaggagcacactggggagggaatacagattccctgggcgggcacaccaggcacaggggagccgagcacaccagacaggtcatcatttactgtttaaaatacaatcatgtttctttcttgattagacttttaaagggtcagttattgatttgtgagtcttagaaaataattagtatctgccaaaacttttgaacatgatgttagtcaatacaccagtcatctttcactcagaatttatatcagtcaccattcattcattccacaaatacaccagtgtgggaatggggagagcagccctgtgggtagctggtcccattgctgagggaggcggcaaggcctagggagtggccagggaacaggggaggtgggcccgggggctggtgtgggacttccacatggtaccagggagaggcccatctcccctccaccggcagcaagggaggcagacggttcacgtcaccgtgcttgtgtgttggaattgaaacaccttttgtttgaggagcaaaagcgtcagcaaccgtggggggttgagctgtgccagccacagcgtgcagtggggcagcctcctttctgcctcccctgtcttcccgtcctggttcttcccagggcccctcagctgggcctcgcctaggcagcctccaggccaccctccaggcagccagagggaccctgcagtctcttgctcatcactgtcccccagggtgaacttcgtgctgctccgtgctggctccctgctctgcccagctcagcgtggcttgtcctgtcatggaagttctcccttgctccctggaggccagttaacgtctatttctccctcagttctcagctagcctttattgtctcaggaaaaaaagctggaggaaaaatgtcatggtgctcataatgcagaaacttcattcatgaggattgcctcatttgtcagcataaaatatagcaaggttagcaacactgctgcctcgaattctgggctcaagccatcctctggaatagctgggaccacaggtgcctgctaccctgcccagctaattttttaatttattttcattttctgtagagatagggtctcactgtgttgcccaggctggtcttaaactcttggcctcaagtgatcatccagcctgcatgatcttattttttaaataggtagtatgtgcccatgcactggaatgtacacagaacaggatcggcccccgaggctgtttctggtgcagggcgtgccattgtgtattctgtgcctttgggggggctgtccagccagctctggtcttccgtctcccagcactgggcgggaggtcctacagcttcaccgtggctgatgaacgaagtgcaccccggcagcagtagccggctctgggcatttatacttcatgtttgatcaatataatcagaggggttgatctgcgtttgctcctcccagcagtgcagaaggtgcctcttggctcagacttcactgccatcgtgatcttggccaggaggatggctacaaacagcctgaggcttaggctcatggctggcgttctgtgatgaggccagtgaacctacgagtgtccgggggcctcctcctacctggtggctgcctgtacccttctgttttccttttggcttgttgatggttttcttcttggcgtttaggtgctctgatgtagaaaagggagccagcccgccacctgtgtgatgtgtggccggtgccccacagtttcctgtccagggacttggctgatggtgcttttccctactgagatttgcgcctctgtgccgtgcactgtatcagtgttgccttcgtggctctgggcttcgtgtcttccttccggaggctttcctcactccaatgttttaaaagatcatcccacattttcttctggtatttctctaatttacacttaaatctttgattcattgggatttgtttcagtgtgtgctggaaggaagagatccgactagatagtttttcagaggtcatcttccccgtgcaccccactcactaccctgaccgtgacttagacactcagggtttgtttctgtactctgttgtgtcctgcaggtgacaccgatgctgtcccctgcgtgttcgggattgtggtctgtgtgtgttctcgtgttaggcctgtctggctctgcgtgttcgggattgtggtctgtgtgtgttctcgtgttaggcctgtctggctctgcgtgttcgggattgtggtctgtgtgtgttctcgtgttaggctggcctgctctggcgtcttgctcatcttgtttgttcccctcatttctgcttagctttccacgggagctttcacgctccacttgtgtggttctaacaagacacccataggcaagtatcggcgtgatatgtccatttagggagaattcctgtctgtgatgttttgctcctcacttccctggtgacaggatattaggcaagcacaaagagtcagcccactccaaggacccctgccccagagagagtgagtgtgcaagttgagtgtgtgtgagagtttcacacctggcttacatgcagaacggggcacttgccacatgggggggagtcttggatgttgggattctttgagggagcctcacatggcccctgtccttctgtccttggccccagccctcctggcttggccgccctgtcctgcgtgtgagcgctggtgcgcgtcttcttgcagtgcgtgccgccccttccaccgcagctcggagtcagggcttccgtgtgagccccagccgcaggcctctgaaacttcagtgcgtgctggcggccaccgcggtcacacatttgatctataacagatcaacagcatggtggattcaaggaaacattaccaccgtgtttctgatcctatcccagaacttcctttcggtcttcttttaatttttttctatagcagtttacattatttgattattctttaacattttcttttttaatctaaatgctcttcgcactttgaatgactcctgccgagcgtagcctctggctgccatgctgaccatgagggacactgttggatcaaagccctggtttggtctcctgggctctagggctccacttttctctggattagcggggcccacgctgtggcctccttggaagcctcctgccaggcctctgcctgtcgcctacagcacgtctgcagactgggctgaatccataaggtttagtgtcgcttctgcccctgagaggagttgatgctgcctcactgaccccctcctggtctctttctacccctggccccttgctgataataagatgtgttctatttgctggcctggagctggagcccatcagctcgtccgctgggatcagtcctgtggccttgactttacagcagtgccagcctgggcggcttatcctgcgcaccgtgccacaggaggctggtgaaggggcaggaggggaacatagcgtattttattatgctgctgagaacattctgtgaggctgctctgtcagtcagctgcattccataaagctgcagcagaaaaccaagcccaaagcccagggcttcttaacaacacaggtttagtggccaccttgtcacacgtcatctgtggtcagcagggcatggctcagctgcaggctaaggacagcccgtgtgggacaccctatgctcacagaggagacatacgtgctctggcacggtgggcagcggtccctgaagctgggctcacactggcccacatcccttcttgggctcaggccaggccggccactctgggacaggggcgcccccacactgctcacgtcaggagggacgggggcgcccccacactgctcgcgtcaggagggacgggggcgcccccacactgctcgcgtcaggagggacgggggcgcccccacactgctcacgtcaggagggacgggggcgcccccacactgctcgcgtcaggagggacgggggcgcccccacactgctcgcgtcaggagggacgggggcgcccccacactgctcgcgtcaggagggacgggggcgcccccacactgctcgcatccagtggacaagggtgatgaacggggatttcctggggacctcccttctctttattcgagagctcaggagatactgggaaccaaaggctactgagggccgttttgcagacacgtcaggcaggatccggtgtcctgggagcgcgctgtgccatatcccacatcgggtctcctgtaaatgagccgccgagccgacatgcgtggctgagggcttagctctggacactgtgcctgagagtttcgtgttgagaaggagcccacatgcagagcagtgtgcagtcacgggtgtgtgggcttcgcatccggaaggtgagcctcgtgcccccttcgactgagcacgctcccgagggcaccgtgggtcaggacgtaactcacgtggcatacgcggcgccccgcgcccagctgctttcgctctagcaagcctgtttgggaaacatcttgttgccatgatggtcttagtgctctgtgtgcacatgctcctgtgtaaggttagttgcttttcctgttcaaccctgtggctgtagtttgttgttgcttgggcgagtgtgcacgtgtgagcatatgagtgtgcgtgcaagggtgctgtgtgggcctgcacatgtgaacatgtgtgtgtgctcgtgcacacacatgtgcagccgctcaaggttggggtctgtgttttgttccctgctccatccctgtgtgtagaatgcactggcaggtggtaggtgtgctgtgcatagttgttgactgaatgggtgttggaggggacagagcttgctgcgtgtcccagggtctcctgtgggcgggcagagcagtcactgggccggggcggagggcaggggtgcaggtgctgtctgtgctggtcccgcagagttgacgggcgccgacctgaaggactgcgtcagcaacaacagcctgagcagcaatgccagcctccccagcgtgcagagctgccggcgcctgcgtgagaggagggtcgccagctgggccgtgtcctttgagcgcctgctgcaggaccccgtcggtgtccgctacttctctgtgagtagggaagggcccaggagcagcggagcggtctgtgctctgcagagactaccgagcaggatctgtgggccgccctagagacagcggcaccctgcgggccctgagcagccccgtggcaggggtctcccctccctggaccgccaccctctcaagagctcagaggagggtgggttgaatcctgcccctggttctgcccccagggagcgtccctggccctcccgctctctactggggtctctctgcagcccgcagcactggagcttcctatctgtgttaagaagccaggtgcctgttgccagctcttcaaagagatgttttgcttttggggaaacagctggaagcagcagtgcggttccctaaagtgctgggcagcgatgaggtttctctctccaggccctcgggcagctcactgagcagccagtgaccccgtggtttctgtagaaggggaagtaggaaaaaggaggaccctgtgtcagtgttaataaatggtgtctttgtctttcttaggattttctaaggaaagaattcagtgaagaaaacattttattctggcaggcctgtgaatattttaatcatgttcctgcacatgacaaaaaggaggtaagtccacgcttgggaagtgggggctgtgtgagagtggcgtgtgagagagacgcatgtgaggggtgtgtgagagggccacgtgtgtgaggggcatgtgaggggtgtgtgtgaggggcgtgagaggggcgtgtgagaggttgcgtgtgaggggcgtgtgaggggcgtgtgtgagaggggcgtgtgagagggacgtgtgagagggccacctgtgtgtgaggggcgtgtgaggtcgcgtgtgtgaggggcgtgtgagaggtcgcgtgtgagagggccgcgtgtgtgtgaggggcgtgtgtgagagggccgcgtgtgtgtgaggggcgtgtgtgatagggccgcgtgtgagagggccgcgtgtgtgtgagagggccgcgtggcctcattggaggctggctcggtgcagggagcatctagagcagttggaaagtggatgataaaatattttcacatggcttgaaaaaaatcatttctttttcagaataaatttttaaatatacatgatatttaattttgcctaaacctggtttgtataacgccctcagccacagctttcacagcagatggggtgtctttcagtgtgctggaattctgaggaaggaacgtgtatttaggggaatttgaaagcaaattggaggcaggagggcatcccgggccgtgctttcgcagctcctcctgcgcctcgtgggaggtgcaggagaagcctgggagagacgccttggcctggcccggcctggctgctgtttcctcagttggcctgtggcctggcttccaggcttcggggctgctttcgtctgctcgcaatgctcagagggcgctgctctcctgcactcccaccttgccaagaccaggtgtgtggcgacacacggcagtattgcccctgcgcagctgctgctgggctagcatcgcccgggtctttgggacactttaagtatccgtttaaacaatcgtagaggagcccgcgcagtgctgctgcattctggccacacttttatttatttattcaagcaagaggtatttactggggcccgtgagaacacatctgtagagcccgggggtgtcgggccttggcaggcagcaggagtgcggggagaggaagccttgccgggctgctcaggtgcctttcctgtcagctttcctacagggcccgggagattttcagtaagtttctctgcagcaaagccaccaccccggtcaacatcgacagccaggcccagctagcagacgacgtcctccgcgcacctcacccagacatgttcaaggagcagcagctgcaggtaaccgcaggctgtgggagcttgtggggagtccaggctagggctcggggtatagggtccaccttcaaagaacacgtgctatcaggcaggccagtggatcgagagcatcacagacgcaggtagagaaacgcagacagaaagtggggctttcagtagggtagagaaacgcagacagaaagtggggctttcagtagggccatgaaataagtcccgaaccactgcgtgtctgtctgcaatgagccggctgttcacgctggctcatgtttcgatcctgtgcgtgtgtggaatcacacctgcctgggggatggcgcatctgcgtttgaagttttgcatcgtaggacattgctgtggtcatgggcattaggccccaggctattcgagacgtgcctgtgcatgtcgctgcggcacgtgggtcacgttcacagaagcatagggtggcattttcaaagcagtctactgtaagatttctagtcgcttttggttttaatcttatttaacaaaataaaagttctctggggtctgctcgtgttgatggcttctgtaagttgtcaggattcacttaattttaagagtgataaaggctggttcgttatgagaaagaagactcagatatagaggcacactggaaataactcttaagtaccctcagggctggcgggggaaaatggactgaaacgatgtcctttcaggacagggccagtggttgcctacaggtcgccaagcagcctcgcgcctgaggctgcatgtctgggtccctcctgtgactgtcccaccttacatcttctccccagatcttcaatctcatgaagtttgatagctacactcgctttctgaagtccccgctgtaccaggaatgcatcctggcggaagtggagggccgtgcactcccggactcgcagcaggtccccagcagcccggcttccaagcacagcctcggttcagaccactccagtgtgtccacgccaaaaaaggtgacctccccgaggctggcctcacgcccctgtgggttgtgtgtcatcagctgagagctgttctgtggggagtgaaaagaggccctgtcggcgtcttcaccagtggtgggtgacgctccatgctggaaagttccagctgctgtctggagtcctgtcagggccacaccatgacctgtagaagtgataccatcccatagagtgcttgtgtttacagctcagtattgcctcctttgcacttaacgtaatagtaaaataacttcacattgttttaaccaaggtttccatttgatgacagttaagtggaaaatcaaaatccggccgatccctgaatgaagagctgggggatgaggacagcgagaagaagcggaaaggcgcgtttttctcgtggtcgcggaccaggagcaccgggaggtcccagaaaaagagggagcacggggaccacgcagacggtttgtggggtggctcctgggctgtggtgtccaggccaggcagccgcgtccccgtcctggcgtcgctctggtggttggcggtgaccttgggccatgtgtgcagtgagaggccctgttggcgggtcgaggaagcttctctgaatgaataaggaatgccgctgtgtctggggacacgacctgtcagccagccagagggcagcagggctgctccagaatcttccagagaaaagggctcaatacatttcagcccatgcctacctcaggcctaccccacacagtggcggctgaacatctgtgtcctctcctgcttttcactatccaagtaataggtgtttttggtagaaaatttggaaaatacaatcaagtaaaaataggaacacacaaatgtgctattgggtgtctcccccagtggcagcttggttctctgccagggctttttcctaggtagatgtcagggtccatgtgccttttacatgtgtgtggttttttaaaatgtagtagcatagttggagtagtgagcatttttcaagttaagattggtatttgatattgggggctgcccattctggatgctctgtcccttttttcttcgcacatctgagacttcctgtaacaaaagttaggcagagagacggctcccagggcgccagggggtggggctgcagggcccttggcggctcctggccgagctccagacaccagccgggtggttttggcaggtggcagggcagagggcatggagatgcccatgctgaacgctggcgaagatgaggctgttctgtaccaggtgctgaaaagcacataggggagaactgggaagattttcttctctagagatttttgggaaagggattagttttcaggaatgagtgtcctgcctgaaggcaggggactggcacttagcctgtggtctccaagtttaaatcaggcagtgaggtgattgcgatagcaccagctggcatggccctggtggaggcaggtgagcagggtgctctgcgctccgtggctgcggctcctgtgtgtgccctgcagtgccaagcatttgtgcgtggctgctccccgcctgcagggggaagcgttgttcccggggcgctgaaggacgcgctggtgagggcttgacgtgggcagccctgagcttctggccatgctgtgaggtgctcttctccgagcaaaggcagctgagagttgcagagttcacctttgtcggaggccacctgggagatggacactatgttattaggtggggccaggcctcccgagtacctgggagatgggagtgttcgcttcagacagtccatccactcgtgcccatccccatacctggcagatctgcaaagggctttgaaaaccttgatagagccaggcgtgggagctcacgcctgtaatcccagcactttgggaggccgaggcaggcggattgcctgagctcaggagttggtgaccagcctgggcaacatggtaaggctctactaaaaatccaaaaaaaaaaaaaaaaaaaaaaattaggggccaggcacggtggctcatgcctgtaatcccatcactttgggaggctgaggtgggcagatcaactgaggtcagaagttcgagaccagcctggccaacatgatgaaaccccgtctctactaaaaatacaaaaattagccagatgtgatggcacatgcctgtaatcccagctactcaggaggctgagacaggagaattagttgaacccgggaggtggaggttgcagtgagctgagattgtgccattgaactccagcctgggcaacagagcgagactccgtctcaaaaaaaaaaaaaaaattagctgggtgtgatggtgggtactttcagtcccagttacttgggaggctgaggcatgagaatcgcttgaacccgggaggcagaggttgcagtgagtggagaactacactccagtttgtgtgacagaacaagactgtctcaaaataaataaataaataaataaatgaaagcaaaccttgatagcagtggcgcctggtggctcatgcctttaaatcccagcgctttggcggtggggcgaggtgtgaggatcgtttgagtctaggagttcaataccagcctgggcaacacagcaagacactcatctctacaaaaaaaaattaaaaattagccaagtgtggtggcgcacctgttgccctagctactggggaggctgaggtgggaagaaaattgcttgggtcctggagttggaggctgcagtgagctatgattgtgccactgtactccagcctgggggacacagcgacgctctgtctctaaaaaacacaaagccaaccaaaaaataaaacccagactgcaggcacccccagaagtaacacattctgatcttggcccaggatgtggcctgggcatctgttcctgtggaaggtggctgcagtctgcaggccagtaggtctgggagctgccttcccctctctcctcaggccccagagcccatgtgcagcggtgtggtttgggagcaggtgctgtttgaaaagtcctgtgtccgaattttcatgatttgtaggttagcctaagaatatagttagttgaggttggtgaaaattgacacttcattacggttcatgtcaggacgtcagaggaaaaggacgtggaccgagtgggtctggaggccgcatccggctgagagcgctggctgttgccacagttgggggtttccagttaggcccagaaactacatttggggatgaaagctccagatggaatggaggaaaggcccttaccgggacatgcacctgggtctgtgctgtgtaactgcacgtactgatgtgatttgttgggcacctgccatgagccaagcatgttttggagccaggatgtggcagtagacagggcagagagtagcatctctgctgcatggtgggtagagccttgttggtccctgactggcttccagggttaggaagacacatgtgactcgtctccaccagagacggcaaagtgatgcctggtgggggatgggtggggggggcttcctggcgtctgtctgctcagcctaaagggggcagagggttgggagatgtgaccgaataaacagggttctgattgacgtgagtcactgtgtttcccctgtcaagacgccctgcatgccaatggaggcctgtgtcgccgagagtcgcagggctctgtgtcctctgcggggagcctggacctggtgagtcactgtctcccctcgtcccacaggcctcaggggtgtccccaccagctgactgatgacacctctctcccatggaaacctgtgtttacaaaactcagcgttcactttgtaaagctgggggacaaggctcgggtgccggcccaggcacagtggcaaagtgcagggtggcccagtgccccatcaggccccggcctcatggtcccccagcctagggctcctgagagggcacgaaaaactattagttatacgagggagggaactcaaagtatctttggatttatttcttaagtctttttgttgtaatttagtttttgtgaactcccactaagaatcaacagaaggtgtcgaaatcaggcgctccctgtctcagcgcgtgagcatcccacccactcccacactgcaggatttacccctctgcctgcgggccgcctgtctcacccacaccctctcacacctgctcactgcttggctggtgctcgtcctggccccagtttccagcagatgagggagatgagcaggcgcaggcaggactcgtgagcttgttagatgttgtttgataggaattttggaaaacctcactggttgccagcatcctggtcatttgaaattttcaggcaggaatgaatgtagaatataatttcttcttcagttgttccaaataacattgaaagctgtaaggatttaccaggtatcagttagctcttgttgcctaatacctccgcacccccaaactcagaggctggaaacaattactgttgtgctgggtgtctgggtcgcctgggtggttctgcccattctggccggccttgccgtgtgtttctggttacctggcacgtgagccagctggctggtcccagaggccctcagttgcatggctggcccttggctggggaaggagcactgacaggacccttcgttcgcctcactcagcggaggccagttcaccccgtcccacagccggctcagggaccctgacagtgagcagagtaaggacggcctctggaggcccaggcttggagccgctccttctgcccacccaggtctgggctggggctgactccacctcttcatgggaggagccacagagccgcattatgaggggcacagatacagggaaggggatggttgggaaccacttgtgcagccagcctaccactgtacaaactagtttcctgaaataatgctcagggaaaagagacctcagactaccggaaggcagtgccgacgaagtcacagtccaggcgacgtttccattggaacgatgtgcatggggagctgtgtatagagaggacagggtgctggaacccagagccctgggagggagtggtcctcacagggcagcttcagtgggccccgcaggacagccctgcttctgggtggagaagcccagatgtgccttctgagcacgatggcccttgaggcccagagctgagagaatgatgaccgctctctcgtgttaattcacaaaacccagcacctcaggcagtgtggactgagcctgagatgtgtgcacctggggagctgcaggtgggaccgtggcagggcgccagcctccccagcacgtgcggcctgggccagctgggctgctctgggaggtgccccgcacccctgtgacgctggttccctcacggctgcttgtctcgctgctccccagtcggaggcctgcaggactttggcacccgagaaggacaaggccaccaagcactgctgcattcatctcccggatgggacatcctgcgtggtggctgtcaaggcgggcttctccatcaaagacatcctgtccggactctgtgagcggcatggcatcaacggggcggccgcggacctcttcctggtgggcggggacaaggtactgggcccgcctgaccctcgtgctgccctcaggccatgacctccccgctccctggcccccagctttgtcagagtcctcaggctgccccctcctgcgctcctcatttcaacagcgcctggggcggaggccggattatctgaactgagctatctgctgggagcactttgcacgtgggtgctgggttggtgtggaaagggtgatcgctttctttggatggctgtttttgaagctgctcttctgctctgcacagctgtgtgcctggggcacgtgggtctgcgtttggggggctgcctgctgtgcccacgttgattctggtctctctgttcctcagcctctggtgctgcaccaagacagtagcatcttggagtcaagggacctgcgcctagaaaagcgcaccttgtttcggtaagaggaagatcgctgtcattcacctgaggctcccagagccaaccccgtgtgcccaccacctgctggtctctgcgcttagcgggcggcctgtggatgctccatgctgggctacgatggggtgtcggggcggggggagggtggaggcccacacgaggcagcccccctacaagcccgggggtgagaggcgccctctcctccctgtcccgtgaacagggactgccctggcctggtgagcccagccccctaagatgccgagagggaggggcaggagtgctctctgtagggtggatgccccacaggtagccaggctgctgtgcaggacactgctatccctggaggaggagaccatagcccttgcttggcctgacttttcccacgtggaggaaggcacgttctgatcagctggggctgaactggggggcacaccgaggccttgagggcggcctggggctgtgctgtagttctgctcgtgagactgatctcctaatgagggctgacatgagttggtagtgaattttttcatcccccaccaggctggatcttgttccgattaaccggtcagtgggactcaaggccaagcccaccaagcccgtcacggaggtgctgcggcccgtggtggccagatacggcctggacctcagtggcctgctggtgaggctggtgagtgttgcacggggcccgggcgtcgtcaccgcaggcactgtctgttccctttggcagcctctgtgttgttcactgaagagggcacaccaagaagcggtgtcttcccctgatctggttgtcccccttggaggagaggagacagcctctgccatccccagttctcgttctgtgcagtgggagccatcatggtttatttgtaccttggtcattccaaaaagaattgatatttgagaggtggttttgctccagggaggccaaaatgagaaacaaagcaaccaaccctggactatcctccgctgttggccaatgtgatcagataagagagtgcggatggccctgcccccactgcacctgctgggcccgggcattgtgctcatgcccccagtgcacggtcacatggagatgtcctgattctcacctgcactttgtagatggaagaactcagctggcatttccaggctgcgccattatgatgtgaatggggttaagaaagaaaacaccgcgtggggtggtgaccgcaggtgctgggcaggccacgcgagatggcgagagctgggccccgctgagggtgctctggagcgtgggggttccgggcacagtgtctgcctagtcttctttccttgaaaactttattggagcaatgatttcaagtattttcaggattttagttttccctgaaactacactcaaaattattcaagagctttgaagtgaacaagaagaacctattaaattatttacagacaccacctccgagggtaacctgaagcctcttccccgcgctgcaggctccatcctggagtccagaaatctgcaggtgggagacagacctggcctggctcccaggtgtgcccctctggccgactctggggagacgctgcgcaattgtttagcccctgtgtgtcacagtttccctgactgtaaaatggggttggtcgtggcagcgtgctcgtggcatggttggggggcaccagggtggaagggctggctgcggtcaggctcgttccctgtgagctgcggccctcggctgccgaggctgtgggggctatggaggattcgtgtggaatgggttgtttgggatgtggcttttccttggacgctgtctcctgacctctccagtgaattctgtggccccctgtgtccacgaatgtggtggagaaggcgggacctggggcagttcctctgcttcccccgcagggcccaccacgcctgcccagcggaccagccccttcaggagcttagagcctctcccgcctggcattggacagctgtcattcccctgactgacagatcgtgaatgccaaacatgttcagatgtcttttcttaacagtgactatggcaggtgaagagtcagattctctgccagaggagagctctgatgcagagacaagaactccagcccggtggctagtggcgcttcatttcagcctcaaacctggtcctaaagttgtctgtctttgcttccttgtttacaaaggggaacatctgctctcagtattcccctcatagcagtttcgagggtcagtatttccctcatagcagcgtccgagggtcagtgttccccttgtagcagcgaccaagggttgccacctcctgcgtgattccatcgagcttaggatggtcgtgtagtcgggacccatgtcaggagcatggctcagccccagcttgtgtgcctcagtcaggcaggcctcacctcggggccatctcctgcgtgactccatcaagcctaggacagtcatgcagtcgggtgggatcacacacatctgttccctgaagttccagtctgggtaaattattcagtgctgatctctgccctagagtggagagaaggagcccctggaccttggcgcccctatatcgagtctggacggacagcgggttgtcttggaggagaaggatccttccagaggaaagggtgagtagggctggtgcagcggatggggagagggtgagtgggtccagtgcaggggagggggctatggagccggtgcaggggagggggtgagtggggccagtgcaggggaggggcaggtggggcttgcgcaggagagggggtgggcggggcctgcacagagtagagggtaagtggggccagcgcaggggagggggctgtggcgttggcataggggagagggtgagcggggccagtgcaggggagggggctgtggcgttggcataggggagagggcgagcggggccagtgcaggggagggggctgtggcgttggcataggggagagggtgagcggggccagtgcaggggagggggctgtggagttggcacaggggagagggcgagtggggccagcgcaggggagggggctgtggggcctgcacagggtagggggcaggggttggcataggggagagggtgagcggggccagtgcaggggagggggctgtggagttggcacaggggagagggcgagcggggccagtgcaggggagggggctgtggggttggcataggggagagggcgagtggggccagtgcaggggagggggctgtggggttggcataggggagagggcgagtggggccagtgcaggggagggggctgtggggttggcataggggagagggcgagtggggccagtgcaggggagggggctgtggggttggcataggggagagggcgagcggggccagtgcaggggagggggtgagtggggcttgtgcaggagagagggcaggcggggctggcccaggggagggggaggctttggagttagtacacaaaagagaattggtctgggccccctggtccctccttggtgccctgatctggcgcccttccctccaggcacaaaacaggaagccagggcagtaggcgcctgtgctctgcccggcaaaatggaggctgcaggctcggtcatttgggctggttctgcagttccttgcgtgcagggaatcgggcggtcgacagagctctttccaacgtgttgccttggtcatgacagtcctgccctggggaagctgggtccggccagcagccttcggagatgggctcgtcgcccggcccccacctcatcctgacgcgcaggagccggccctccttagagcccttgttgagaaccgtgcgtgaggaaggttactcagacccaggagggtgggtcctgtttgtagctgtccccagggacaggcagaggcgtggccttggggcctgcaggtgcaggtgccgtagggaggtgtgtcttggaaagagctttctggaaacccacctgcagatgttctaggtagagagctcactttgtgaggagccacttcaggtgacattgggctgcccctctgcctttcaggttgttggccctgatgatgtcacgcagggagcacgtggctcacttgtccccacccagggagacctgggccatgggtcccagtcagaagcaagcgctgaggccattagtcctggagctccaactcttgctcccctccccaactcctcacagagcagagacccttccccgagcccaccctttgctctagggaaagccttacgctgggccctgacacccacccaggcaggtggggcaggcacagcatgtgtaacccagcagggcggccagcagctttgccccggctgaccctctgtgcccagggcctgctgggcctcggggcttgtttgtgtacaggcaagtcctgtggtggagcttggcgctcagcgtttttgtagggctgtatgtggggcaggagcgcgactcctccagtcacatttgggccacagaaatgggcttgaggccgttagtgccagcagaggccagcctgtggccctggcatggggcaaaggctgtatttgaaaatatgtcatggactggcacagtggctcatgcctgtaatcccagcacttttggaggccaaggtgggtggatcacctgaggtcaggagttcgaaaccagcctggccagcatggtgaaacctcgtttctactaaaaatacaaaaattagctgggtgtggtggcacatgcctgtaatcccagctacatgggaggctgaggcaggagaattgcttgaacccaggatgcgggggttgcagtgagccgagatcgtgccactgcactccagcctgggagacagagtgagactctgtctcaaaaaaagaaaaaaaagaaagaaaagagaaagaaaatatgtcataaatgtaagactctgactttctagagaatatttatgccaaatagtatatgaaatgagcttttcaatttcaacatcactcctccagcaagtccctagttagatgtacggagcccggctgtgtgcgtggaggacgggccctctctcctgtcccatggggactcccctcagggctgtgcgtggtgaataagggcagcagatgccttgtggcttctctacagctttgctctcagagacagtaggagcaggttgtctatgaaacattcagatggatttgcgagtccctgaagtcataaagctttcttatgtttagcatccgcagataaacagaaaggtgtgccagtgaaacagaacacagctgtaaattccagctccagaaaccactcggctacggtaattccccaccctggcccaccctgtgccctgctcctctcgctgtggcccccgcctgccctgcgcagtgccctggtgcttccttaccgcctgcttatcactgtgtgtctcccccacgctccttggcggggtctctctcgtccctgccgatgcccagctccctcttacctgtgaaggactggctttcttttcttctgaggtgggagtggttgtgccttaaatgctattcttgtttgtaatccttatcattgcaatggtttttctgcaatgcatgtaaattctgtatcaatgcaatctatttcatagagccttctactctctaactaatgaatgatgtattgtcgtgtattgaaatgaaagtagaactttgactttccttctaatgcagggagaggaaagaacactaggcaagtctaattctattaaaataaaaggagaaaatggaaaaaatgctagggatccccggctttcaaagagagaagaatctattgcaaagattgggaaaaaaaaatatcagaaaattaatttggacgaagcagagggtatgtgaactttttaaaacttccacgtttttagtaaatgcacagttagtttccagtatagtcagtagatctgctttgagctgtcagcatctgggtgactgcggtccgtccctgtggcctggaagacatgtttctcccgggggcagtctgtgggctgttgggatcactccaccgaaaccccagttttgagactgagtgccaggcctcctagggcatcaggggcagccgatgtgagcagcactgtctgccctgagatgccagaggcccccgcaggctctgcctccctctcaccccagctcctccctatggccccaccactggcttgtgccagggtccccagcgtgactggaggcacagttagcattagagagtccaccctaggcagagctgggcacccaggtgaggggaggtggagcacactggtctggaaggaccgtgggcttgctgagctctcttggctgcgggggtcagtgaggaaggtcagcctgcacacccctggcctccaggagagacaacaggcacactggaagactgagatggagagatgagtcctttcttgaagctcctttttctccagaagtttataacaaggagaagcattgaaaacagagtcaaaaccagcagctgtcaccgtgacctgaattttcatccagggcgtacttgccagtccacctggcgtgtcacggctttgtcacagctggctgtggagtctgacctcacggtaaaactaaaacacacctccagcctttgttggccaccgagcacaagtaaatcacacgccctctttgaagcttgtatgtttctgagaaccagtgaagtcagagatttgaggttccttgtagttgttaaaaactccgagtataattccaatgctagagaaagcccagtttagacgccatctacctcgaatggtggccttggggcctgctacactagaaaacccagcccaggtaagaaaaggagagttctggaggagccagccaagaagctggaggcacctgcaggcccccacagtggctgggcagtgggaggcccaggggcacccgtcctggcccctcggggctgtggagcttcagtgcggagagggagagcacgtgttgcccccctctgccctaggcctgggaggaccaccctctgcccagaggcagtgaccccgagaggcaggcgtggatttgagggtgccccttcccagaccacccgtctcagggccttcctctaccacccctcctcgggttcattctgctcccgactttgaggactgcagctgcagctgggacccgggcgggtgcttcagatgctgaccaaccggaggagggggccagtcctcagagggccccaagtgttaaattgaaagcccaggccagagagtcccacagtttcctactcagacggcatcagcgcgtaaccgtgttgagtcaagcgtctcgtttgttcaagtctggacctcacacagcgtggtttttagggagtacacagctttttcagactcctgaagacagagtatgctagaagccccagggctgtcccttccgctgtctgtgggaagatagtgtggacggaaaagggctcttgttgacccacagctgatagggtgttaggacagcccaggatgagagctttctagaatgttctgcggtgacagtcattaatgtgaaactctctaaaacacggtcactctgggttttcttccaatagagttttttgagcttatttccaaagctcagagcaacagagcagatgaccaacgtgggctgctaaggaaggaagacctggtgttgccagagttcctccgtttacctcctggttccacagaactcaccctccccactccagctgctgtggccaagggctttagcaagagaagcgccacaggcaacggccgggagagcgcctcccagcctggcgagcagtgggagccagtccaggagagcagcgacagcccgtccaccagcccgggctcagcctccagcccccctggacctcctgggacgaccccccccgggcagaagtctcccagcgggcccttctgcactccccagtcccccgtctccctcgcgcaggagggcaccgcccagatctggaagaggcagtctcaggaagtggaggccgggggcatccagacggtggaggatgagcacgtggccgagctgaccctgatgggggagggggacatcagcagccccaacagcaccttgctgccgccgccctccaccccccaggaagtgccaggaccttccagaccaggtacctccaggttctgatccctccaccttggccccgtaagcgtggtctgctcagcttccagtcagaaaggacagtgggcccccggctgccactgtttgctggtggtctccgtgaccccctcctcacctgctggttgggggcttccttggccctcttggaaaggaggggctcgtgtggccccaggccagtgtctgtcaggatggtccccccgaggcgctctgggcaggcatcctggtgtcctgagaggctcttgcaggaatgatacgtggcagtgcctgcagcgaggtctgggaacaccctgggtgaggcctgggggtttccgaaaatggaggcattcctttccaaatctggacagcgatcgtttttagtgtttctgtctcaagactggaaaacaatagcatttgtcttgagtgaggaagtgaagcccgctgtgttcatagcaggagagggctcccagacacaggcccgtcctcggaagagccttgagagtgcagctcggacccaccggcggcccccgtagcaggtggtgtgggtgctcgggagtggaggtgacgtcagcagcgctctctgaccgcgggtgtcacgggcatttctcaaaggaagcaggggattcagtgagtgtgaaggtgaacaggatggcctggcagcagggatgtttccgtgagccacaaataccagaaactgaggcgaggctcccagcagccggtagggaaaggtgtttccaggggtccgagggccgtggcctgcgtggccatcccctggagagaggagccgctcagggtgcgcgtcatggagtgtgctcaggggtgcgtggacacctctgctgtggtttgctgctgggggcgatgggagcgcctctccgtcctgtgccctggtccaggatgctgacagcagtgagaggcctgccgtgaggtttggtcttgtcagacctgtagcctggacctcgccgggggaccagggagtgcacgtctgtagatctgtacatatctgggcctttggaggccacgtgtggcatgggaggggctacctggtccctttcacagccaggacacgcctggatgagaaagcctgaggtgcctggcatgcccaccggtgccactctgcagcctccacccctggcctgagtccccctccatccgtcttggtggacacctgtgtggctctcacctgcgttttgagtctgttcttccaggagtaataaattctggacatcatcactggactggcttacaacttttctttctcatttgaaactttgtttccactttagaaaataataaaagtattttaatctaggggaaatatcacacatttttaggagattaagtggatttaccgtaatctactggcttttaaaaatataccatccactgaacaaaactcttgagcacctggtgtgctcccagcagcacagctgtgcggcgggacagcagaagagctggtggcccggtggcgggtgctgagatgagctggcctgctggccttcgggctgcagtcccgcacccacaccccggccctgcagccctggggctgtggctggctctgcgcacaggtgtggcgtgtgtcaggctgcctgggagggccagacagacccacgtggggggtcagttctcctgcctgccaagggccattagcacagaggtggtttacagcgcaggcccagctgagcgccccggctgacatccctgacttgtttgtggcaggagggtgggtggtaccggccttgggaggagcaggtccccctgcgctctggtggctgccccgactgccactggccagaactggttccccgccccgctggctcctcagcccctgggcaggtgggtaccctggatccttggctcttgggctgtctcctaggaggagacccagtgagtgggagaaggaggtgggagtggctttggccataggtcgtaggtgtgtgtcctccacgtgcctgtccgtggcgacacaggacaactgctgaggacctgcccagtcttcctgtgatgttggctcaagcctgctggggggcgttgggacagaaactgctctgtgcagcttgcttctggaacccccactctaatgggattctctgtattggagagttcacctgcccatggcggcaaaggaaacaggctgtgaatgccgtggtggcctgatggaacctctttcacatctgtgggccggggcgagcctggactgagtgctgacctgtccgttttcagggtttaggagcttgggggtcatcccgggtcacgctctccgacgttgacagttgctgtgggatgcttcctcacaatgtggcagccgccctggacccagcgtccggggtgagaaacacaacaggaggtgtagccaagcccacgggctcccgccctccccattgccatggtgggcagcatgccggctacgcgtgggggctgccagcaacagccttgaggtagggggagtctccacagagctgtgccacaccactttgcccttccagcctcagtgccatgcactgtgccaccctgtcctagccccagtgccacatgccacaccaccccatcctagccccagcaccacgtgccatgccaccctgtcctagccccaatgccacatgccacaccaccccatcctagccccagcaccacgtgccatgccaccctgtcctagccccagtgccacatgccacaccaccccatcctagccccagcaccacgtgccatgccaccctgttccagcccctgcgccacgtggtgctccaccacgcccttctagcctcagcgtcatgcaccgcaccgccccatgcttctagccccagcgccacacgccacgcggcactccaccccgtctgtctagccccagcaccacgcaccgagaccgagaccatgcaccatgcaggctggccggtgcccccatgcatgtctggtcccgggaggcatgtgggtgggtctcctttccctttggccacttgctgccaggccacccagtctaatggccctgagccttagctgtctgacacacacaacagaggcctcaagcgggagaagtgtcaggcccctcgtgaggctccagggcacgctggcagaggtgtgcatgtgtccacacagtgctgtgtgtatgaggccgttctcatgttgctatgaagaaatacccaagactaggtaatttataaagaaaagaggtgtaattgacccacagttctgcatggctggggaagcctcaggaaacttacagtcatggcagaaggcacctcttcacagggcagcaggagagagtacgagaaccggcagaggaaatgccagacgcttataaaaccatcagctctcctgagactcactatcatgagaacagcatggggggacctgcccccatgatccagtcacctctacctggtcccacccttgataccgggggattatcacaattcacggtgaggtttgggtggggacacggagccaaaccatatcagtgtgtcaggcagatatacccatgtgcgtgcatgcctggtgtgtgttcgtgtggcatgtgtcggtgtgtgcacctgccatgtgtctgcatggcacgttttgtgcatatctgtgtctcgacacagggaccctccaaaatgctcaccttctgttctcgtggggagggagcagctgtccctccagcactgctgtgtcccgcctttagcagtcatcttccacccctgcacagaagcagacgtctgcgctttgtgttttcacaaaggagagaggcattcaaaaggtcgcgtgcacccacacccgagtttccaatgcacagtgctccttctgtacgcgccatcttaaaacgggttcttacggttgtgttggtaataattcccaattgctttcttaaccagatctgcttcgtttccaacaaaaagcccgggagctgggtggtctcactgctgccctgctggctgcaaggcgacagtcaggggtcctggctgggggctggaggccagtggctcctcccagcccctttggtaaggctgagtacccagccccatggcctgactgagctcctggtgcagacatcccaagaggatggactccacctgccggcagggagatgctaggcaccaccccaggaggggtccccgcatagctctcctggggctggggtcccctggggcagctcactgggcgggctcaggggtcactcaacctggaggccccagtgtcacagctgccagtatcccctaggaacacttttgggcccagtggctgccctcagggcccccggagctcagctacctgccagatgtgcgatgtttgcctgccggggcttctgcagcctggaagtgaggtcacgcccctcaccctgggggtgaaagtaccccccatggcatggccattgtgttgtaccgggtgaggatgcagccccacctggctcctgctctgtccaagagaggcctcctcggcagctcccgtgccccgccctccgcaggagcagatgcagcttagaccccctcactctgatgtggattgagaccgctggttttcttggggacacagccccaggagcctgccactggtctcaggcctgcaaagctgctgagggcatctgctaggtgcctctccaaagccccctctccccagagccccctctccctagagccccctctctccagagccccgtctccccagagccctgtctccccccagcatctcctggctcctgcccagctccgtggctccccaggggattcctgaactgaccagctggcctcggccctcctccacagcccccagcctggttgtgacacgtggtcctcccggatcccaccagaagccaccctaggttgctccccctcctcccctgaagtgtctgccttccacctgaagttccagccaggtcttgcagagtggaagtctcaggcctgcaagtgactgtgacctggcctacccccatgttccctccaggactggccacctgtgcccatctcagcccgcactgctggagctccggcttgaagcccctccctggggtctgccacatgcactcctgtgccctcagtcacccccactcccctattccccactcccctattccccactcaccacactgtgcaccctgctgggcgctgtccactccctcgccaatgcccagcaaatatttgaggagctctatcccagccccagcccatcacacacagtcatgatcctggctggggacccacacggacagggggaccttgggggggtcacactctggaactaaggttctgggggtgctctcgttcccatgggggcccatcagcaggagtgcacaggccttagcaggagcccgtggggtgcgctgtggtgggaaggctgggaagggaaggggccttgggagccacagtggattgtagggtccccgcctctggctcccctcgctccccccttcctgccgtgttctcagtgtgagccggctcagccttgcctgggtgtccttgtgccctgcgagcttccaaggggcgctggggaggcttcacagaggaggtggctgcgcttggcagcacagatgatgtggagcatggaggcagaggctgagcaaagtgcctgggggacggggtccctcggggggcaggaagggcgggcagtgggagaggtgccaggcctgggtctcgaaggagagcctgggagagttcaggccatgcccctgccccggccaggccagtgcagcccctgctcccgctgtgcctgccagggttcctgactcagctttgaggaccagggtggggcggggtcctgccccaggcctaggccagagcagctggcagtggctggcacagagacattcatggacaagtgtctgggaggcctgggggcgaccggcagccggtgaggggcctgcgcatgtggaaagaggggccttcctgctgcatcttgtggggcctccagcaggaccccctcctgggaaggctggacagcacagtcggagccggcaggaccagccagccgagggcagggagccgtggggcgccggggagaggttcacaggtggcccaagcggcagggaacaagatcccagtgtggcctcaggtctggatgtttggagatgtggcaccaggagtgagaccaggaggccaggcccctctggaggtggtgcaggctctgctgggtcctctgtgttgccatccctgccagggaaatgctgggcaagaaggtgctccccgggcaggccctggcatgtaggtggtgaggcagcgtgctgctcagggcggggccaggcagctgagtcacaggcctggggctggctgccctgcacaggagggcgaggctggctcccgtaggcaggaagggcctggctgtggccccctccttgtgatgtggacatccttggtccatacagagctgtcctgtctccagaaacaagtgtttctccatcctgagcacactagcttcctggggccctcaggggcctgtcctcccatctgtccatgtggggctggcggggtagagccgggcttctggacatgtgtggtgttgcaggccccttcagagccctatgaacactccaggcaaatgcccaaatgcccacggtattgaccggcgagagggggcaaacccctgcctctccccacacgatatctcccagccctgcagcctggcatctggagccatgcggacctggtgacaagaaggagatgggcagaactgtccccttgtcccctgggggcagggctagctcctagccctggcagaacctagtaggacacttgttgaatgagcagaggcctgactgggagaagtttctagtctcagctgctccacatggacccctgggcctccagatggcatctccaccgggcctggctgagtaagacacacaggccccacacagctcccacatgctggctgggctgctgcgtcgaggccaggatgagggcctctggggccactgctgggacctgttcaagagaacgggctgggcacgctcaagaggggagtcacaccttccgcccgcagcccggacttgttcacagatgcctcatggaggctgcttccggaagcttggactgagggtgaggaggggcacgctgggattggggaccttggtggccacggagccgctggggcagcaaggaccctgcggccatttcagggacctcagaactgtagatcgaggagggtcttcaccttcccaggccttcgattcacctgtggagggcagcagttggtagcagggaccccctgtccctggttctcatgtgccgggggctggctcttcctgcctcctgtctgctgtgggcccaggcctggggctcctgccaccccataggcgcctcaaggcctccaccctggcatggacatgactgtctcagggcctcagccccaggctcactgaggaagggagctcctggacccctgcctaggagacacgctaggtacgcaggaacctgcccccgaagcctgctcctctgggtcggcaacgtcacccccaccgcacagatgggggggtggggtcactgggcgggtcggcaacgtcacccccaccgtacagatgggggggtggggtcagtgggcgggaagggctgggctctcccagcacgggggcttcactgccccttcccaggccctggggtcctgccatggagctccgggcggcacatgaacccagccattctgcgtgcaccgttcactttccttggccccagccttcgttggcccctggggactccaccctggcatagacacaactgtgtcttccaggggtccacgtggaggtcaccagatgtggcagggcagtgacgccctgggtagggaggcctcccgggggtgctggcaaggagatggcctgcccatgttgggtctagaagcttccaaggccggttcaggcagccgggatctcctggggctggagtgggcattggagccagaagtggggcaagagtcactgaccagccggaaagaggggcctcagtaggggggccagggatggagggggaggggacacgaccgggaggcccagagcagggtgtgtacggtgaagacggtgctgaggcagcgaggcaggtgggcgagcaggtggccagcctggcagggtgggatggggcagcagacacagggctcagggcccgttccaccaggccaagagggtccagcctatctggaactgaaccctagtgctcagccccctgggggtggcccttgaggatgggccctgggcctgggggggcccctgaggacgcccccaggaggaattaggggggcagttggggcgggggctctgccgggggcccagctctgttcctgagctgcagtggggaagcagggtggtagggtttctgagtgggtcggctcccccacttggtggcaggtgttatgtggagggctctgggaacactgcacctcccctgggcgtacctgccccagcctggaggcccacagcgggacgccagctgcctctgggatgtgtttgggatatttcagggacccctaccatgctgtctgtgcaggggccttcggggtagggggtgggttccgggggcccagggccgggccaggcaagtgacagcttctcttctccttgtgacaggaagtgggacccatggcagccgagacctcccagtcaacagaatcatcgatgtggatcttgtaactggctcggcgcccgggcgggatggtggcatagcgggggcacaggctggccctgggaggtcgcaggccagtggtgggcctcctacatcagacctccctggcttgggccccgtcccgggtgagcctgctaagcccaagaccagcgctcaccacgccaccttcgtctgagctgccctggcctggccaactctcctgtggacatgtcggggtggggcagcccaggtggattctgtgggcctcaggggggccaccctggccaccacaccctcaggagcccagccaggagggcagggggtgacctcgctggaggcactggccccggacattcgccatgctggccatggggctccctggccctggcctcctgctgcccaataaagcatttctgaggacccaagcgtcggcctggtgctgggtgctggggacacagactcctcgttctcggggactccgagcacatccccaggaggtcatgcaggaaacagaggggcctgaggaggagaagtgccccagggtaaggtcaagggggctttgaggagagggaagcttggctcctggggcctgagggccaggaccagatggcagagactggctctcgccgtcacgtggggaccctgccccagccttgtttagcagggtggtctgagggcctttctggggagggaccatgtaaactgcaactggacggcagaggaagtctagaaagagccctgggcctgtgccaaggccctggggctaaggagggtctgattacagaaagggaaccaggtgtggctgcaggggaggccggggccttgggggctgggttgagtcggaagaggcagggccattccccaggttgccttgatggaacccctaaagccaagtaccctcggtacagggtggttggtgagctcctcagaccatcctagaggcccgagagcacagccagtcccctggggctgttctagaagcttccagggagtggatgcaccccacttagtggtgctctaggaagggggctgggggaggggtcggaatggaagatgaagcccagtgccagctgtgtgtaccacccaccacaagcccgcatccatcctgctcccagcacccaccatgcctccacattcaccgtgcccccagggcccaccatgacctcccccccaacccccaaccccccattcaccgtgcccccagcacccaccatgcctccacattcaccgtgcccccagggcccaccatgacctcccccccaacccccaaccccccattcaccgtgccccagggcccaccatgacctcccccccaacccccaaccccccattcaccgtgcccccagggcccaccacgcctccatgtgcactgtgccccctggggcccacggtgtcaagctgggtggtcagtgggtgtccattctctctccctctgcacagacaggcaaatggggggcagagagaggggttttaggggatacagggaggcagcttcagccctcgctggtctccaggccacagtggttcactcacccctcctcccacctcggcagccctgggatgtcgctgctgactcaggaggaacccgaggtgccgtagcggctgctccaatattgcagaagaggttcctcaggcagctctgcccacagccccaagtcacgaattccgtgactccagctccatcccaggccccagggtacctggcccagggttgtgctgccgcagacttggcctgtaccatccaggcggcggtggggagctggggttggaaaggcttcttggagtggactcctgggtctgtctgggagacggggaggaagggacactctgaacatcaccaggggctgctggggggccctggccacccccagagtcagaacaggcaggtggggcaggatctcaggtcatcctatgctacactcagc

SEQ ID NO: 515 - DNA, 110495 bp, Homo sapiens
  source 1..110495: mol_type = genomic DNA
ttgggaagtgtgatccttcaactttgttctttatcaagactgttttggatattttgggtcccttataatttttttttttttttgagacagagttttgctctgtcacccaggctggagtgcagtgacatgatctcggctgactgcaacctctgcctcccgggttcaagtaattctcctgcctcagcctcctgagtagctgggactacaggtatatgccaccacacccagctaatttttttgtatttttatttttattattattttttgagatggagtctcgctctgttgcccaggctggagtgcagtggcacgatctcagctcactgcaagctccgcctcctgggttcacgccattctcctgcctcagcctccggagtagatggggctacaggcacccgccaccgcgcccggctaattttttgtatttttagtagagacaggatttcaccgtggtctcgatctcctgacctcgtgatccacccgcctcggcctcccaaagtgctgggattacagacgtgagcaccatgcccagccttttttagtagagacagggtttcaccatgttggtcaggctggtctcgaactcctgacctcacgattcacccacctcagcctcccaaagtgctgggattacaggcgtgagccactgcacccggccccttataattttatatgaattttagaatcaactatcaactcctgcaaaagaaaggagctgacatatgatagccattgtgttgaatctgtaaagcaattttacaaaaggaaacttttccagttcatagaccccagtaatacacatcccttacctttgtgcaccctcaaacccaacagaagctattgggcattagttgcctcttgacagaaaggtattctaccttttccactctgtttaataatcttatatttataaagcagtttataaatatgaagtatagtgttagaagccaattcttggcttactcattgggtacctagtcatctcataagaaaatcaatttaacttactccacatgatgtatgtaaaaagaataataattcttgagtttaagtttgggtatgagttttgcatatgttactagctacaaagatgactgctattaagatgaccttttaagaaacctggaaagattaagccaaccatctgcctgtcaattgcatagcccaagattgtcaagtactattggctatcacacaccactaacacaagaatttttgccaaacaatctatttaatttatcactatatgctaagctgtatatcacttggatcatttctttccattttgatttaggattacattttaattaagaatacatttctgcctttagagggcactcataacatacagtacctagacattcaaaataagcagctctaccaggaatagaacatgaaagatctgtggataagctgctgatccacaaagcaggtaatccttttgctttcattagtataacttttggagaagtctccccacagattcagagccagcccagcattaaccaaacaaagagaagcagagtggatcctgtgctaatattgggaaaaccaggcaacaggactcatttggggcctttattgtgaaaacatgccccagctttcccaagataaccaagagtgcctccagaaacatttctccaggccgtctatatggacacagtttctgcccctgttcagggctcagagatataatacagacattcaccaaatcacagaaaatgaaggagacctcagggctgttcctgatatcaaggtaaggtgatttccacaatccatgatcctttcccgtcaagggaaagtgtttacccagaaagaatataaaactatactcaagctttagtgccattgctcacttatcttaatgttttatcaaaaatgttttcaaaccatccccaagggaaatctagaacctagatgataattacctgatctatctagttttctccaatctaaacagattccctttaccaaaataaattattatgtattgcttttttgtttgtttgcttgtttcaggtgataacattcaacaaatctagacagattttgtggctattagtgttagccctaggatatctttctccgatataaatattacatcccatataataatgaaagaaaaattatagaccgctttctacaaaaaattccttgggaaaaaattgataaactaagaacataagaacattaaggagctgaggggtgttttttccaaattcaaagtttccaaaggtgaatttcctaagcatgagtttctatcagtaggtaataacattatttctccaaaaagtgacaattttcctgctggatgttgtgtgtatatttgaaaaaaatacagtttgagtctgtaaatcctcttagctattaatagaaccatctcataaaaggttacttggcatagaatatggacatgtgttaatgtctaacaagcaatgagcacactcaaaattaaatgctgcaaaactataaaactgttcaaatactttaacaccagaaaattcacctgttcttttgccgcggctcatatcctgatatcattatttatttgcaaattctttacaaaattctctaggtctgccctttctcctaatgttattttaaccatttggcacaagtggaggggaaaaaaaaaataaaaagggtcaacacaaagctttttctgtaaaaatatacggacctgttcttttgagctttcagacatatgtgaacaaataacacatgaattcccacaccgcctattatcatctaagcactaagagtttagcaagctgcaatgaaatgggatgtagtgtccaagagtcctgaattaatggacatcttaatgtaggcgacacatgcaaaagatatttctaaaaggcagaatgtggaggctactttgaggaaacagagagcaacaacaacaaatatacccattgtatggtgcatatgtatgctgttgtatatgtgtgtatgtatatgcacccacacacacatatatataatttcaaagttctaactatcttgagaaggtatgctctaagtggaatcaaagacaaataaaatgcaaaaatatttaagaatcagtattacaccttcccatggcatcctggaatcgaccacacatgctggtgctgggcagcctaacttctatcctaacctcactaacctgttaacaggttccagtctgtacagcagcaggtgagggtagaaggaagcaatccagttgggatgctactggctccttcactcagtttttgccttttgaaaaaatctttttatattgcatttgaatacagaaagaggagacatgtgcctcatctagcaaatgtaaggatggaaacactcaactcattttgagtctgcagataccattgaatccttactaactgcaaaaccttgggctaggagccatagggaataaagagaaagagcaagatatgctccctcctttctagagacttactgtgtattgagaaagacaaacatatagcatattatcagcatgactcatgtcaataacataagatacctacataattattgtatattctttcaatcagtaagatattaggggaggaatatgatcactatggggtaagacaattgaagaagcccagtgttagagtgaaagcagtgaaatctaaggtagacgtgaaataatgtctaagaacatatatagaggcagaaagagggaacgtgagctaaaatgtatctagacgtcaaggggtcagtcagaaattctccaaaaatcctcaacctaagctttgcagttcatgcaaaaattacccccaaatataacatgggcttaaatttacaactacacggagaactatagaacttttaggaaaaaaatgggagaaaatctttatgaggtagggctaggtgaagaatacacagacaccaaaaaatcatgatccgttcaagaaaaaaaatcaataaataagacttcattagaatctaaaaaacttttgtcctgccaaagactctattgagagggtaaaagacagcatacagatggcaggaaaatactttcacccccatgtctgccaaacaccttgaacctagaataattctcaaaactcaaaagtaaaagacaaacaatccaacaagaatatgggcaaaagacatgaacagccattttactgaagagaatatgcagatggcaaataaatacatgaaaagatagtcaacattgttagccactaggagatgcaaattaaagtcacagtgaaatatcactacacaccgagaagaatagctaaaatggaaaaaaatagtgactataaaaatggctagaattgctaaaatggctaaaattgtgacaacaccaactgctggaaaggatgcagagaaactgaatcattaatacattgctgataggaatgtaaaatagtacagccaatctggaaaacaatttggcagtttctcataaacctgaagatacaactgccatatggtctagcaatttcaccattaggcatttatcccagagaaatgaaaacctacatttgcaccaaccctgtatgccaatgtccacagctgctttatttgtaatagtcaaaaaccagaaacaacccaaaagcccttcaagggatgaatgattaaacaaactgtggtacatccatactatggaatcctatgaagccactaaaaggaatgaactactaatacacgaaacaacttgataaactttagggaatggtgctgagtgggggagaaaaagccaattccaaaaagtcacacactatatatatgtgtatgattctatataagccactctttttttttctttgagacggagtcttgctctgtcgcccaggctggagtgcagtggggcaatctcggctcactgcaacctctgcctcctgggttcaggcgattctctcacctctgcctcccaagaagctaggactacaggcacgtgccaccacacccagctaatttttgtatttttagtagagacagggtttcaccatgttggtcaggctgatcttgaactcctgaccacaagtgatccgcccacctcggcctctcaaagtgctgggattactgacataagtcaccatgcccagcctatataagccactcttgaaataaaattatagacgtagagaacatattcatggttgccaaagattagggattaggtagggtggtggatatagctacaaaggggtcatactttaaagggagcctggtggtgatgaaccagttctgtgtcttgactgcagtggcagttacacacattacatgtgtaatgtgctaaaattgcatgaaactatacacgtgcacacacagaaatgagtgaactctgaagaagctctgtgaatggtaccaatgtcatttcctggttttgatattgttcttcagttatgcagtctctattgagggaaactgggtgatcagtacacgggaccactctgtacattctgtgcacgtgatttcctatgactatagcattatttcaaaataaacaattttaaaaagcaaacctctaaaggcaggttaaactgacaatatgacacacaaatcacctacatttattgttgtggttattccagttgttcttttcatttggctccttgggttaatagcattgatgtggtctgacctgttttagagatgagaaaacaagtttagatatactattggttgcatatgtgaagtcagctgagaggtgatttgaatctggattttctgacactgatttcaataagtatttgatagcttctgacagtgatttaaaaagtggactgtagtttcctgggcttgaagtcagtcttcttcatagtactttctgtatgatttctgcccaaaatactccaacatgggccactaatttactacaaaataaactacaaaatcccacgcacctgcacatacactcacacacttgtcttcatcagattatttatttatttttcaatttttttttttttttttgagactcagtcttgctctgttgcccaggctggagtgcagtggcgtgatctcagctgactgcaacctccacctcccaggttcaagtgattctcctgcctcagcctcccaactagctgggactaaaaacgtccacaattacccccagctacttttttttgtatttttagtacagacagggtttcaccatgttgactgggctggtcacagactcctgatctcatgtgatccacctgccttggcctcccaaagtgctgagattacaggcgtgagccaccgtgcccggctgatcagatttcttttttcttccatcaggatttttgtttcctttcagggcaagaatgcaagtgggagggcgggtgaactctagccagcagtttttctagacaatcgacatgaggaagagaaagcattacagctgctctagtgataagtcaactctgtcaatatagatatatatgtttatgtgtgtgcattctttcttaattataaacatggtcagagcttagacaagagagctgtttccacaaggttatttttcagcccattccaaagtcaatgcccttctgaaagtgtgggcttctgagtgctctgctgttccagacatgtgatcccttgagcagctgatcaaagcacttattttgagaccttatacacagaaatgagaaaataaatctcaaggcaccaaagggcagctacaaagacaatggagccttgtgtgatgaaaatgatagaggaaagaagaaaggaaaaacagcttagtaagagagcaagtacgcctgttggccaaacaccttaccataagtgtattcagaagacagaattattctgtcctgcctccatttgtgaaagagtaagttcactgagaagaataaagttgtttcttattttcctgaaggcgctccaaaaataattccatagtaagtagtttaacacttgagatgttcacaaacctattgaggaaagggctcatttggaagtcagccatacttctctctgccgtggctagcatgcacatgttcagtggctgtctcctctggcacctgctgcagggtcttcccaagtgaggccaaggggatgtggctccacaggccttgtggctcaggtccttgggttctcagtgagcagtacttacttggtcttcctttgatggagaccataaggaagaccttgggtatgctctttgggaaagtgaaaaaaggtcttcaattattcagcctctaagctcacagaacccaggacaatccatgtgatattaagaacaaaaaaagaggggggatggagaaagggaagatgttggtcaaagggcacaaagtatcagtgagatgagagaaataaattttagtgatctattctacagtatggtgactgtagttaacacagcttgagcatccctaatctgaaagtccaaaatgcaaaatgctccaaaatctgaaactttttaagtgcagatatgacattcaaaaggaatgctcattggagcatttcagatttggatttttagattcgggatgccaagccagtaaatataatgcaaatattccaaaagctgaaaaaaatctgaaatccaaaacacttctggttccaaacattttgtttaaggaatacttagcttgtaatcatgtatatttcaaagttgcaaaaagcaaatttttaactgtctcatcacaaaaaaaaaatagatgagatgatggatatgttagctttatttaaggtttctaccatgtatacaaatattaaaacatcacattgtaccccataaatatatgcaattattatgtgtgaattagaaataaaaataaaaaaataaaataaaatagtgtttcatcttgtcataaaaggtacttattatcatcccagagactattcttatatagctaacttggacaatcccttacattaattaagcacctaagataccagctaatgcctttcaaagtaaaaaatgaaatggtgatcaacttaaaagtaaatggcggctagatgtggtggctcacgtctgtagtcccagcgtttgggattacactggcagccttcaccacaccatccactgggctctaatctgagcacctgtacactccacttacaattctgattaagaatctgaacaggaaaaattgaaaaccattctatcaatgaaacaggctagtatctcactgcagtaaggcccgcaggagaggtcataattagaaaactctggtgactataaataaaaaataaagcattctttatatcagaaatggatgcatatatatatacatatatatatatacacacacacacacatccttttaaaaacctctatgtacacatacccgaaagaaagcataatgtgtatttgtgcttttcagatatacattggcttgaaaaaagtcaatgtaatattgcaaagagccagaggtggcattgctgaagaaagagaggcagggaagagtgaaaagggcgatggcacatgatactgattcaccctggaggttttagaaacaattgagacgcccccaagcaaggaaggtggagaagggtctccggtgatcagctggggcaagctcaaaagattatttgctgcagttaatgtggccccattttttttaacctgtaggccatgtccaatgcctccttgactgtctgaaaaatatccagcaatggaactggggttatgtttaaaaaaaaaaaaaaaaaaaaccgcggggggtggggcagaggaagtgggaagtactgaaagggttttcagaagagagatgtggtctttgatttgccttaaaataatccaggggaggaggaaagtaggagtgtaagagataatgcagacttgacaatgtgttcttaattattgaaactgggtgatggacatgagggttcatgaagatagtcactcagattttttgtattttgaaaattaacataatacatttgtttttaagaatcccaaagactagagcttacgatgtacctttaaatttaaataacaaacgaacaaacttttcatattctatttatacaccacaatggaagctgttgtgtatgctgtctagcaaacattcagtaactgcacaaatcatcttgaccttttggggaatattttaaatggcaaaaaatatcccatatgaaaatcaaagaagcatactgcaaaaatcctggctagctttagtatactggtttgtttgtcttttcattgattttacaactctcagattttaaatggttttaatggttacagaaaaatatatctagtatcattaccattgttcaaaagtctcataaaatcatgttggcttccctgctgaaatcaagccagtcttcacaaagccacagaatcactgcaaatgttttagaaaatttacattaaagttttaccctcttgcaagataaagatgtgaataaactatattgggaaactcagggagtgtattagtccattttcatactgctgtgaagaaatacccgagactggttgatatataaagaaaaagaggtttaatggactcacagttccacatggctgaggagccctcacaatcatggtggaaggcaaaggaggagcaaaggcatgtcttacatggtggcaggcaagaaagcgtgtgcagggggactgccctttataaagccgtcggatctcatgagacttattcactatcatgagaacagcatgggaaaaacccacccccactattcagttacctcccaccgggtccctcccatgacatatggggattatgggagctacaattcaagatgagattttggtggggacacagccaaaccatatcggggagtaaacttgtttttctaggttctctagaaaccatttatttccattctatgagaaaaggtgatccaaatcaagcttgtgtcacttaagagtttattttagaaacatctatagaatggttttacagctcctgcatttcaaatgactgaaaaatgaaattttaagatgaagcaaatatgttgaaaggataatagtttaaaccatatagtgacaactggaatatattcaaatattcaagaaagaaacccaaatcacagactacaaaagtaatttgatttgacatcaactatgtaaccaaatatgttttcccataagactatatttggcttatatgatttcgaattctcaacactaaaaattgtaaggatttatattcaagtgatagatcattctaagaacttttattcaaaataagactggaaatgaactaaaatatgcaagacattgtctcaacacgtttttgtaactgtctgttcaaattgcatatgactagaagacaaaaggaaatagcaaggaggcaggaggctagcagcccaggaacctcagaccaggaatctgtggaagatagtttaacaccagcaaactgcctctaatagctgtggctccatgttctcattccaaattcccaggagagaggatctggcccagtatagatgtggtctctgtctcaagatccatcagccctgctgagcgcagtgggtcacacctctaatcccagcactctgggaggccaagacaggtggatcacttgacgtcaggagttcgagcccagcctggccaacatggtgaaaccccatctctactaaaaaatacaaaaattagctgggtgtggtggcacatgcctgtaatcccagctactcaggaggctgaggcaggagaattgcctgaacccaggaggcagaggctacagtgagccaagatcacaccactgcactctagcctgggcaacagagtgagaccctgtctccaaaaaaaaaaaaagatcaatcagccctagctgttctttaggttgtaagacaatcttaaggggttgtccagcacatattttgagtgattgcaactttaaaccaacttatgggattccaaaatcaacgatgacacctgaagtagacagccctgatttagatatttgaggcctggcatttttatatctatcacccacaagctttgtaatcacgcctcagagataattctacacatcttctctgtttatctcctattcccaccaccagacattctgcaaagtatctgtggataagccccacaaaactagagtcagcagaccctcagcccctaggggacacaagctgtgaagttcttgtgtgaccctctgtcctctcttgagtcagcgtgacccagtgtgggtcatcggataaacacccacactaataaatgaatatttttacctgtaagttatcaacaaaatatatagattgtgtgaagttacataaaaatagttgagcaaaatatgaccaaatgaaatgaataaaacattacttgaaagaaatgatcaaagcagttgatactaccaatgtcacactgcatttccgaattctgtaataaatctgctgtctctgcttctgtgagttgtatttaaggctttcatctgtgaccatttgcccagaggatcatgttctgaaggatatatttttgaagttttcatttgaagagaaagtattattaccatcaacatcgtatcaggaggacatgcaattaattttacagacagttttgttgaagaacaagtttgctggattaaaaagtaagcttatgatcagcaaataaaatccaggtactattgcttccttttttctgtttttgccttgtcttaaaaatacctgcacctgattatttttaccaacttattagcatcattaagatctctaagcttcccctttcccagagctgcagttttggagaagccacacatctcccatcatttgttggcccgtggggagtccaagctttgggggggccaaccattgccccacatggattctttgctaccctgaagataagcagagtgaaggtgaggagggtgtgaggaacaggaggcaaaggagggtccctcaggcccctggtcgttagcctggaccaaactagaagttaagagaagtttgcctcccctctctctcacccacccctcaccttggactcttcgccaacatccacagacataccctaggaacctcattctctcattctggcctagtttctccctttaaaaaaagaaacaaaagttcaaattcaaatgcacttagatgtaaatgaattcatacatcactcctgctcatgaaatctacagggaacactcatattagatccacaagaatgaacctgagtagtgtaatttggaccatataaaatctgagcaggtgggagacttggggttcagggctacttccagcccctcctcagaaaccacactccagcgtgatgcaaatcctgctggcttctacttctgatcacagagaaggtgcagcgttccttggttctgtcttcacttcaaaacctcctgctttataaaaaattagctggagggctaggcatggtggctcatccctgtaatgccagcactttaggaggccagtagtttggggccagcctggacaacaaagagagatccagtctccacaagaaaatttaaaaattagctgggtgagtggcacatgcccctaagtcctagctactcaggaggctgaggcatgaggattgcttgagcccaggagttagagactgcagtgagctatgatcatgccactacactccagcctgagtgatggagtgagaccctatctctaaaaagaaaagaaaatctcctccttttctaagttgttttggccaaaagccaggttatagttctgcttggtttatccatcagaaatgggctgggtttttagatacacgaaatcacaaggggagggggaaataatgcctttgggttttaggaaatcgggaaccagagagctcatgacattttcttttcttttcttttcttttgtttttgagatggagtttcgctcttgtttctcaggctggagtacaatggcacgatctcggctcaccgcaacctctgcctcccagttcaagggattctcctgcctcagcctcccgagtagctgggattacaggcatgtgccaccatgcccggctaattttgtatttttagtagagacggggtctctccatgttggtcaggctggtctcaaactccggacctcaggtgatccgcccgcctcggcctcccaaagtgttgggattacaggtgcgagccacagcgcccggccatgacattttcaaattccttctccctgagtcaagattcagagctcattgctcccttcttggaatacagccctccacctcactcccagatgcaataagcattctcaggggcccaagagcagatgggctcttctttgctaatgctttttaaaggcagggagtagaacaatggcaaatggtgacatctggtggaaatccaagcactgcagcacttcgaaccagtgcgacttgaggctcagttgtaactaactgaagtctgagtacttgaagatgtccttttttaccaagtgaaaagctcagtgatatcacccttttggctgacacaggtacaccctgccaccaagcaagatgatgacataaagggcaatgtctttgaaatgccaagaattggtttttgaattcaggtctaagttgtatttcattctctgagtctttgttttatctttttttttttttttttttggcagagtctcactttgccacccaggctggagtgcaatggcgccaactcggctcactgcaacctctgcttccccggttcaagcaattctcctgtctcagcctcccaagtacctgggactacaggctcatgccaccacacccagctaatttgtatgtatttttagtagagacagggtttcaccatgttagccaggatggtctcaatctcctgacctcgtgatctgccttcctcggcctcccaaagtggtgggattacaggcatgacattttatcttctataaaatcaagacaataatacttttcacattcaatttgaatggttgctttgaaaaaatcaaatgagacaaggcatgtaaaaatgctggtaaactataaagacatgggcttttttaaaaaactcagatcatggtggctcacacctgtaatcccagcactttgggaggccaaggcaggtggatcacttgaggtcgatcaggagttcaagaccagcctggccaacatggtgaaaccccgtctctacaaaaatacaaaaaaaaaatcagctgggcatgatggcgggtgcctgtaatcccagctactcgggaggctgaggcaggagaatagcttgaacccaggagttggaggttgcagtgagctgagattgtgccattgcactccagcctggcgatagagcaagactccatgaaaaaaaaaaaaaaaaaaaaactcagatactttgagtttttcttttaaaagcctgcatcggtgagtccagctttccattagccctgtgctgcctcccgggaaccccttggaatcctatgggctgggtttgtagccagtttctcccataatagttgttaatctagttatctccatctgcagatggacctcgtacatagtgggcacagagtaagagcccagttaatattgattggccagttgattagtagatatagaaatgcattatttccctaatttttttccaccatgtggatgaaacaagatttcatctgattaaggtcagagatcatatggtatttcttgatgtcttcaaactgaaattgttaaaatctttcttcagacaaatgtttcatatgccctgaaagaaattaatgacagttaagaattctgaatggcccctaaaatgtttcatatcaaggcagtgccaacctccaacttccccaagaaaacatcccctttaaaatgccaagcaaagcagtctaattcagtcgcgtccaactcaaagaaatcaatgcccgctaacaagttctcccagcagccaggccagaggagggagaaagccttagaacgacagggccccgcatggcctgaacgaggctcacacaaagcctggtttattaggaaccactggaaaagctataaagcccaggcagccttcctgggcctgtcacaaattgtccactttggagagaacaatgtcttccctgttcttgccgtcttgtttgttgattttcaggctccatcagtgtgaaattgagagatccggcccaggtccgtggggacaaatggagtggccctcttgtgtcaggccttctctgaacatccattttaacaaacctcataccttcagggtctactcatgcaattgctgcagcctctatcccacagtttctcgcctctgtaattgagaaagagatgagatgcattgtttagaaatgtaaaaccacatctatcaaaaaacatttttattacaaaagtgttagacataatagcataataaaaccgtatgtgcccattacccagcttcaacaattatcaactccagatcatgacatttcaaagttcattcatttaacagatattcattaagtacatgttatatcccagtactgcttaggtttttttgtgggggttttttgtttgtttgtttgtttttgagacagagtttgccctctcgcccaggctggcatgcagcggtgtgatctcagctcactgcaacctctgcctcctgggctcaagctgttctcatgcctcagcctcctgagtagctgagatgacaggtgtgcaccaccatgcccagctaattttatccatttttagtggagatggggcttctctgttttggccaggctggtcttgaactcctggcctcaagtgatctacctgcctcaatgttccaaagtactggattacaggcatgaaccattgtgcctggccaactgcttagggttttgagacacaggtctgaatattgcaaagtcctgaggctcacagagctcagagcctgatgggaaaacagactatcacaatacagagcatgcaggcaaccccaacgtgagagagcttcctgagggaaatggcatctaagctgagacttgaaggataaataggagaggagattgccctgggagagaagaagaggtaactggagaggggagtgattcaggcagaagcagcagctgacacaaagtcccaggaatgagaatgaacaaggaaattttaggaacggaaggaacatgaatgtatggtgctttgagtaccaaggaataggtgacagaaagatgggtagacagagtacacatcagcaaatcgcagaaggtcttctatgccatgtgaagtcacttgaacttcatcctgcagagaaatgatgagcccctgtgaggctaaaaggaagggaagagaaggacacatttacctctttttttttttttgagtcttgctctgtcacccaggctagagtgcagtggcacaatctcggctcactgcaacctccgcctcccaggttcaagcaattctcctgcctcagcctcccaagtagctgggattacaggaggcacccaccatcacacgcctggctaatttttgtatttttagtagagacggggtttcaccattttggccagactggtcttgaactcctgaccttaggtgatccacctgcctcggcctctcaaagttctgggattacaggcttgagctacttagcccagcctcacatttaccttttagaaagatccctcatctgtaacgtggggaatggagtggggtgggcagaggcgccgtgtaggtgcaaaggctggaactgttaaggaggccactataatttaattaagagagctgggaagtaactgtggggatgttgagaagtgcatgcttggggaggcaggttggctctcgctggggattatgctctgcttcctctgtaaggtggaaggtttggggtttggacgtgtgtgtgtcctaagagagggcattggagactgattacgtatcagagaatgggccccatgctgaacccaaacgtaggctcggctagaagccctagagaccatcttcggcacagatgaggaaactgaggcccaggcgagtacagagatggatccaaagtcacaaaggaaacttgtggtcatgtctccctctcctgacccttcctccatcgctctgtgctttagccaactgtctcccttcatttcaccagtgcctcaggagagcggcagagcctgggaaaacgtgacaactcaaatggtggcagtgtgaaatttatctcttatgccactcaaaaaagagaagttgttttttaaaaaaaatattctgagcaactccatcccctacgtttctcatgctacatttttcatgcctgcatttgcttccaccagctcttgggatttggatgagagggtttttcatttctcatggctactaacatccatcttcaaaaaaccttaggatgaaatatgacagtatgaaccttgttgacttgttttacagactaacaatattctgtactccatggatttaatttatcaaaggtgtctggcattacttgacgcagatcctgctaatatcttcattttggtgtgcactctttactgtgtaaaatgtcaggggcgtctgtcatttctaatgccctgttggtatctaaaacactgtttccaaatcttaggtaaatccaaccattacggaagtagtcttccttccttccttccttccttccttccttccttccttccttcctttctttgtttctttccttctttctttctttccttctttcttttccccaagacagggtctccgatcaccagtgcagtggtgtgatcccagctaactgcagcctaaacctcctaggctcaggtgattctcctatctcagtctcccgggtagctgggactacaggcacacgccaccacacctgtctaatttttttgtattttttgtagagccggggttttgccacattgcccaggctggtctcaaatgcctctgctcaaaagatctgcccacctcagcctcccaaagtgctgagattataggccttgccaaagctgggtcattctttttattatttttgtattattcagagaactaatcaatttactaagtaaagtggagaattagcagccatgtgactaactgagctagtacctacagagttcaagtcagtaattcaacctcctgtgtaggcttggaaatatgggattagtaattagtcattgaattcctatttgctgagggtgagaggatgacaaatttaaattttggtctaagatgatgaatgtggtcaaaagtacttaattactcctagaaactatcataaataggcattgggagaatatgaaccaagaatatcactctcatagattacagtcatcagcatcagttaacaatgactatgtctcctggatatggtgtcaaggagcgtgacagccaggaggtgggtctggggagccagttctactacttactcacgctaacagaaatcatccggcctcactggtctgcagtttactcatcgaatagctgggggcaggagggagtagttattgatataacgtttataggaacattttataaatgtgtatacctcagggtaaaaaaaagtcaatattcttataataaagataagtatacaaaatgtgtttttatagggttctactattctctaggaatagcttcactggtaaatatatatatatatatgtatgtctatattagatatagatatactcactgaatttttaaaattgtaaacctccatgataagaaaatatagcagtttggacaaatgcatttttttttttgagacagagtctccctctgttacccatgttgaagtgcagtggggcgatctcaactcactgcaacttccacctcccaggttcaagcaattattctgcctcagtctcccaagtagctgggattacaggtacgcaccaccacgcctggctaatttctgtatttttagtagagaaggggtttcaccatgttggccaggctggtcttgaactcctgacctcaggtgatctgcccacctcagcctcccaaagtgctgagattataggcatgagccaccgcgcctggaaacaaatacaatttttatagagctggggatcccagaaaaacattctaaaacttcaaaagtgagttttaaatgtttcttttcaattttctgatatcaaatgtaacaattcctgtcctactctttggggatatagaatgctacaagaaaagaagcaggagctttagtttatttcatgtttgtttttctttttagttagctagcaaatataaaaagtggggagaaagcacaggtagatcttggaatcttaggactttggcacatggactctttatattcctgtcatttaaaatgttgtttagttaattcacatttatttattagaacattcaaaattaaaataggggctgggtgcgatggcttacgtctgtaatcccagcattttgataggctgaggtgagcagatcacttgaggtcaggagttcgagaccagcctggccaacatggtgaaaccctgtctctactaaaaacacaaaaattagccgggcatgctggcaggtgcctgtagtcccagctactcgggaggctgaggcaggagaatcgcttgaacctgggatttggaggttgcggcgagccaagatcacgccactacactccagcctaggtgatagcacaagagagactcagtctcaaaacaaacaaacaaaaaaccaaaacaacacaaaattaaaatagcacagctttacagttgtcaggaccggtaggctacacacaccaagagaacatggaaaggtttattgatcacatattgaggccctctgagcagaacagggcaggaccacaagcaggcccaaaattggccaagagagcagagaaaggagcgtggcttggggttcatagtgggactgagtggagggttctcctttgcaatggccaggacttgtgtggtttgaacttcctgcaggtgctgcccaaggagggagcacctgtgcttttgtgtcagcttacccagatgttgggcagatgggggagtaggagtgatggtaactagaagctgccaatggccaaacatttaaaaaaaatggattctgtgtcacagactctttattacaacaatataaagaataaaatatatacagtatagtcagtctccatcccaccttttccaaccaccattctctcacccaaggcaccaaaccactcttcacttttttcagctcctaagctctatgcatccttacagagatagtctatgtatacacagatatgtgtgtacacacacacacacacacacatctcattccctttacaaggaacaaagagttagacaccagctagactagagtttgtttataattcttcaaacctgctctgctattttctagatacgattcattgggcaagttttttcacctttatgagtttctgaagtctttacagtcttctgtaaagtgcatatgagactaatgcctgcatgcatcattatcgtatggaataaataatgcatctttggaacagtattaggaacattatagatggtgtcccttttatcttgtttttcttcaacttcttgagctgcacttcatcagcctcatttgaaatttccccttcctttgttgactttgaaataccaggaattttctaggctttcctccttggtctttttctcatttcacttgactcattctccctggctaagcttggctgtgtcggtggctttgagacagcctgtggactgatgattccactcagctttgtctcctgaggtccacacagaagctgcaaatatatgctaagtgtcgagatataaatgtctagcagcacttcaaaattagcaatataggccaggtgcggtgactcacacctgtaatcccagcactttgggaggctgaggtaggtggttcacgagctcaggagttcaagaccagcctggccaagatggagaaactgtgtctctactaaaactacaaaaattagccaggtgtggcggcaggagcctgtaaccccagctactcaggaggctgagacaggagaattgcttgaagccgggtggcagaggttgcagtgagccaagatcgtgccactgtattccagcctgggtgacagagtgagactccatctcacaaaaaaaaaaaaaaaaaaaaaaaaaaaaagattagcaatatgttttcccctttccccagactcttcttttcctgagttttctatccagcaaatggttccctttcaacctagaaacttggaggtataattcttgaccttgcttttgtcctcatttgaacctccagtcaatcctcaaattttgaccacactactcagaattatcccttgatctgttcatttagttccaacccatttaaaactttcctggatcaagtcacaatcacttctcaaaacattattgcaggccaggcacggtgggttacacctgtaatcccagcactttggtgaaaccctgtctctactaaaaacacaaaaattagctgggcttggtggctggtgtctgtaatcccacctacttaggaagctgaggcaggagaatcgcttgaccctgagaggcagaggttgcagtgagttgagatcatgccactgcactccagcttgggtgacagagtgagagtccatctcaaaaaaaaaataataataataataattacaacagcttgtccctggtctcctttccagtgatgcctgcttctaaataacactagaggacagagagatctttcaaaaacacacacatgattgtgttgacttcctgactaaatgttgtcaagggatacccttttccacctagatatggttcaaactccttaaattgattcagtcttctatctctctgactctccctctgtttcctggtctctagggatcctatccaattccagtagctttaaatacctttgtatgctagtgcttccaaattcacatctcctagactcccacccagacctccctaccctaagctcaagcctcttttacatcaacctgtctgacatctccatttgaatgactcataggcatctcaaaaatctgtctttagcaggattcttgattttcctccctagtcctctcctttcagtaagccattcaactgctcaagtaaaaaaacactaggaattatctttgattccttttttctcagcctgcacttacaatccatctgaagtcctgttaattcaatctttaaaacttctgccaaacctgtccatttatttatgtttttatttacatgacctgtccaagtcatcatcttctttcttattcctacccttgccccctccccaattcactccaatactcagcagccaaagcagtctttaaagatataaactagatgtctctcttgctgaaaaacctctcaatgatttcccattgcttttacaataaaatccaaaatccttaccatgatttggttgcccttattcaggctatatggacccttaataccctcccattcaccacaccatgagagcaggtcatgctctttctcattcatggaatcccaagcatctaggacagtacctcatacacaggagacacacaataaatgtttgttgaaagaatgagtaagtgagtggcttacaagacccttcctcgtctggtttctgtttccgctgttctctttctactcccccatgtcacaatatatgttccatcaaatgctaggagcagaatgagactaggcaatgtctctcttacaagcactttgagtggcagcagcagaaatcaagtgagagaaccccaagagatagctgcaaactcaatgagagaataaagagtaattaactctgccgtccttcctccctgaatggacttcttgggcgcctctcagctcacatcttgagggtttttttttaatttagtaaaatataaacaacataaaattcaccattttaggcatacaattcaatggcactatctatttccagaactcttttatcttcctgatgtagttcagatgttgtctcctctaaatctcatgtggaattgtaatccccagtgttggaggcatgacctggtaggaggcgattgagtcacgagggcaaatccctcgtggctgggtgctgtcctcatgatagtaagtgagttatcaggagatctggttgtttaaaaacatgtagtacttccctcctctactctatttattgctccccctcttgccatgtgacaggcctgctcccacttcgtcatctaccatgaataaaacctcccttagacctctccaaaagctggacaaatgccagtgccatgcttcctgtacagcctgcagaaccatgaaccaattaaattgcttttcttgataaatgacccagtctcaggtatttctttatagcaatgcaagaatggcctgatacacgtctcaaacagaaattatgtatccaccaaacaatcactccccattctcccctcttctcagcctctagtaacctctattctattttctgtctctttgaatttgtctattcttggcacctcatataaatggaatcatacaatatttgtccttttgtgtctgtcatctttcacttaacatcatgtttttaaggttcatctatgtcatagcatatatcagaattccactcctttttatggctgaatgatatttgagtttgtttttaattcatctatccaacaaatattaattgagtagtttatccacccaagcacttttctagattctatggagggagcaataagtgaaagagacaaaattattgcttagttcttacaaataaacaagtgaatatatactatgtcagatggtgacaagtgctatagaaaaaaaactgtattgcagagaggaactgtagaggaagaagagatctcaaaggcagagtggaatcattcacgtagttccttgagaactagagtaaggattttggattttactctgaaatgagaagtcaatagaaagtctggagccgggatgggtgcagtggctcacacctgtaatcccagccctttaggaggccgaggagagtggatcacttgagaacaggagttcaagaccagcctggccaacatgatgaaaccctgtctctactaaaaatacaaaaaattagttgggcgtcatggcacacacctgtaatcccagctactagggaggctgaggcataagaattgcttgaagccaggcggtagaggctgcagtgagcccggtgatccaacaaagcaagactccgtctcagaaaaaagaaaaaagaaagaaagtctgcacctgtagagtgacattttcaaggataactgttttgaaggataactttggcttcggtgttgagatgagactatgacaggaaatatggcaaacggaaggagaaagatcagtgaaaggtgtgcattagtcaaggttccccagagaatcagaagcaataaggggtgtgtgtgtgtgtgtgtgtgtgtgtgtgtgtgtgcgcgcgcgtgtgcttgcgtgcatctgtgtgttacatggggagagatatactttaaggaattggctcatgtaattgtggagggtgtcaagtctgaaatctgtagggcaagccagcaggctggaaattcaagtaagagctgatgttgcagtcttcattctgaagtccacaggacaggacagaacagttggaaactcagtcagcgtttccatgttgcaatcttgaggccaaattccttttgaggtagaatctactccatgcctcttcttagcctctggtggtttgctgtcaatctctggcatttcttgggcagtggatgcatcaacccaatttctgccttacatggcattctctctgtgtgtatatctgtgtcgaaatttcccctttgtataaggacaccagtcatactggaatagggtgtccttcatcttactaattacatctgctgcaatgctatttccaagtaaggtcatattccaaggtactagggactagaattttaatatgtaaattttgggaggtgcaagtcaacctataacacagggtaacagctgtgaatatgaagtagttggatttggccagagaattttaaaaagagagtctgggatactccaatgatgtttttcgcctgaacaaaaatagttaaacttcccatttgctgagctggtgaagactgcaagaggagaaagctcggagaagaataacaagggttcagttttttatgtaataagttttcaaagcaccatctccagcagggcatggtggctcacacctataatcccaccactttgtgaggccaaggtgggaggattacatgaggtcagaagtttgagatcagcctggccaacatggtgaaaccccatctctactaaaaatacaaaaattagctgggcatggtggcacatgcctgtagtcccagctactaaggaggctgaggcaggagaatcgcttgaacccaggaggtggaggttgcagtgagccgagatcacaccactgtactccagcctgggcagcagaataagactctgtcaaaaaaaaaaaaaaaaaaaaaccaaaaaaaccaaaaaaactaaaaaacaccatctcctaccctaagtcccttacttggctagtaatacctatggcgagaacagaggacccagttatctctgcagaagcaaggcagacagagcctttgagtgtttcccttctctagacatacaagtcatctaagtagctctcatttctggcccactccacttccctttccagcccctcctccctcgttatcattgcctccattacacaacatttccttatgacatctccatgtaagccttaggcataaatacattttaaaagttattaaaagaatggaacaagtcagaactgattatgagctgcagaaatattctttttaagagttgtatgttcacaaggaacattaagattctgaaggaaccttaataatagaaacatattatgaagagttgggttcacctcaagttaatattaacctgtgactctaatagccaggatctgttagcttatttatattgccacctttcaatctgcataatttatggtcaatgcagggaaagatttgcctttatagttttcactgtcagctagattcttccatccaagtggaagaattacatttccaaataacagaaagttaaaatgtataatgtgactaaactacagcaaagtggaacttaaaaataaagttcaggagaaaataggtcatttcataaaactaacttcaaattctatttgaactgtgactttaattctaaagagtctcagaaatttttggtacaggagtcatttattctgctatggatatttcctttatgaaatgctgctatttaagcatgaatgaaaaccttccatttgaaatgggcaagacattgttcatacggatttaggctgtggcgattttcgtctgcataaaggcactctggttgctgttcagtagccaacatgattgattagggaagtggtggttcaatcagaataaagtattccccaagtattctggatccctaaggaccagtgcttccaggaatacggtactgatgattccattttgtggctattttttgacagtcctcagactgtcaaatagaatctggcctaaaaggaggacaaggctctctgaagtgcagcccttcgggcagctgaaggtctttctgcagataacttttctcagatcgaattttttggctacattgatactcttcggctctgtccttgccagaagttcggaaggattccagcgccccacaccttgcttgattcaccctcatcccctcccctaactggagaagccgctgggtcccgcgccaggctcgcggtggcttcagagtagcaggggagcaggcggctgatccggaggccagtgtggggccggcaagcggtgactgtctccagaggagcaaaggagccgagtcttgtttttcttggatcaggtttgggacttttattctgtctgaccatttccaccacttgcctcacaagagtctctgtctcgaagcacaggaccgaagcaaaatgcctaatgaagcgtgcctgaggaaggggcaggggcttgcaagtgacttgggaagaaggactggggcgaagggagaaaggaggttacgagttcgcacgttctcacaaaaccatttgaaaacatgagctggagacgccaaattctgggacccacgaaaggctttggagctcgctcgggctcctcgaagttgggcgtgcgtcgcagaacagtgctgggcgctctctttcagcattttcggcttttttcaagcccttgcgtagggtcgggaaggccgtgggtgggctcagtcaggctttaggtcgccaggaacccggctggtcctctctcgacttcttagcgtggggtcccgccggccctgccgcccgtggccgccgaagttcccgccctcgccgagggccctcgctccggagtggggcgcagacgcggccgccggcccgcagtcccccgcaggtgccgcccaggactagctgcccggcggaggccgagcacgcttggcggcagctgagcctccaccccaagccccagccggaggggcgcgtcccctgtcctcctcccgagcgagacgaacgctcagcagctcgttccctgggcgccaagaccgatttccaagtcgcccactttccccctcgagggagctgttggcgcttctccagaagcctcctcggctcccagctccagcccctaaaataaaagcaccttgccagagagcgggggaggggagcagctgaacgaggagaatgaaaatactgggagaacgaccccattctccaggaaaaggtaatgaggggaagtgaaacagtgtgaacttactcggaaatgcaaaccgagttcaactcacccaggagcaaacaaacgacagcaagacaaatcagccaccgcactcgcggcttcccagaaagggcctcatgaatgagaatgggttgctaggtttccttccctctctcctgacaatcgcttcccacaagacttccaccgccgaaagaatacaggccgggcctggtgactgcggagtgagggaaccgcgccaggcccacgaggccgctcgcgaccgctcccgccttcaggaccctggagagcggccgccgcgcccctgggacccacgcccaacccagaacacccgcgctcgcctcccgcgcctcaccaccccagcactttattcgctgcttcccgcctccaccttcattttttttggcaaccaccgctcttgtttttcacagacagattaaattgttttttgtttggcatgagggggtgtttggattggccgagctacattccggtttgtaactacactaaacgttagtgtaccaagaaactaagagcgtctcaaagatgacagtctgaacgtggcaggtgaccttaaaaagccactgagttcaacccctttataaatgaactcaaaaaataaagagacattcccaaggttagccattaagttagtggcaaggttgagtgtagaaccgtgggtttctgacttctaaactagtgcttccctccactttccaaaagaaaaaaaatatctcattgcttaggtctcctaagcaacaagtggaaggtggaaaggccggtgttcccgggaataagaaggacacatggagtttggaaaggaggtctgcagagggttcacttgtagtagcagccctaacatggaatcccggtgtccccagctccacgcaacatacctacagccgcactggccagtccctttttccaaccagcctgtggagggtctgaggcccttcagccaccttcagccactatctggaccttccatagacaacaatcccaatagaatctagtagccaaggccaactctgtgcctctggcaggcagagccctgggcacttagggagatgggaaagggcagggggaacaagggaagaccagagaagggaggggaagagcaacagttacaaaagtgaactaagattttcatccaaattctgaagaaccaggcgatgtgaacacagacccttctgcataccgcatgtcacattcagcgcgcatggtagtcccctgggaatgttaccatgcagattccgatgcattggctgggtggggctcaagagtctttatttctaacaagctcctaggtgttggcgaagctgctggcctacggaccacacttcaagtagcacggagttaggaaatacaggagtgggaggggaaagaatctaactataggcctttccttctgctttcaccgaccttctcttgcacccccaaagtaacgcttcaaaattctgtagtaaagagccccatctaagcggccggacaccacagtaaccgtatgctggttttgtttctctctccccaccccagtccttcccgcctgcacagctcccagactcgcccgccgccccgaagctgttcggcctcctttctagcccgctttccagcctcgcaaggttcttctctcaccttctccggcgaccccctcccgaggctccccggaggcgcctggacttctcccccctgcttcccgccctgccggccgcccggctctcgagggggcacgaggagctgccgggccgcctctcgctcctgctcggggcggcgctggcactgcccggccgaccctcggggggtcgtccgctgaggcccccccatccggtagccaagcccagggaagaagacgccaccgctgggcagagctcgcctatgccggtgagtaccgtggtctccactacgccccacacccagcctccccaggacaccagcctctcccgattcttcctaaccccaactgacccgctccgctggggctagcagtagggagggtggcaaggtcgggaaggccgggacgtggctgggcaagtcctaggacgggacattggcggctcccgggacaccgcccctccccgcgggaagacactccaagctactttttcctgggccatttcctttccatggtccaagaaaacgggagggagccctcgctcttccccgaggctgcctttcaaactctcagcgtgtcgctctcctccgcctactccgagcctcccccaaacgcgcctccgcctgctcccagcgctcgctctcccactcccctgccctctcggcaggcaagggaggaaatgacgtgatgttatttttgtgtcaggtcagtttccagcttcagcttagccctccgggctccagggaactaaccccgcggccccaccgggtcccactcccgaagggacgctgcgggctacggggacacgcggtgctgcgagtccggagagctgggcggctgggttccccctcccgctgccccctggtctactcctttccccggactccggagtccctggagaaggggacgcggagggcgactgccgagggtctcagcgggatctggagtcaggggttagttcccccccttatcccccgctcggttgctgggtggggcctccgcgctctggctagctgggagggggcgagggccgctttccagggcgggaagaccggaggcctaggctgcgccggggtggggcggggacagagctcagagaggcgccccgggccggggagaaggtagggggctgccctccagagacgcgcagtccacagacgcgaagctctggggaccaagcgccccctccatgcctgccgcccacccccgctccttcctcccgctcccttcattcacgaggtccgagcacgcagtccagcacactctagtctcgctcggccccgcgcgccgaggggaggcgatgacacagagggcttcgcggacgccctctacgcgcgcctggcttcgcatccacactcttgggacttgctaatgcggggctggagcagtggggctgcggccggggtggaggtcgcgccccgcgtggggcctcgggggtacccctagcacccgcggcggtggagtgcgccgccgctggagggaggcgagacgtgggattgcccggccgggtaaaaggagtgagggggcggggaggaggcagagcaaggggaggaagaggccgggagaagagggctagagcaaagaccgagagccggagaaaggcgaaaggcgcggtgagcaatcgccgacgtagagagggcagccctccgcgctgcaatattgagaaggcacccgcgggacgcatgcgcacggcggacggaggcgagccggccggggcttcctccccggccggcagggtggacggtgggctcgtgagtatcccagttcctcgaactctctttcttcgtctcgggctcgccctgaggcttcgtgctggaaagtggccgaggctgggaggggcgcgccgctcgtccggacctcagggtgtcgccgttgctgcggggcgggagccggtgcgagtcgggggttccttcccgcagtgcgagtttgggggagtggggctgcgagtgcgtccgcgtgcgaagaggggcatcgcgccaccaggatcaatatgtcccgggcctgccagggcgtccgcgattccacctctgcggcttcgcgtcggtgtcttggtggggaacgcgggagtctagtctttagaccctagaaatcgcattgaccacccgaagcgtatttcggaaagaccaggcgggtggaagcgtcggctttctcacgggatagggagaggacaaggaaggggttgggcgcccggggctggtggtttgagcgccgctgggaagggtaaggagacagagcctcctggaatcgtagcgcctccttttaggagaagtgcaaccagggcaggggcaccgaggggcagggtgaggaagtggacgccccacgcgtggaccctagaagaccgactaggtatgggcgttcactcggagcctctgttcacgctcttgaaaaccgaatgaacagagaagtgccctccacccttcgcctgcgccagggcagttaacgtgcaggcgccgccgggattttcctggaacaaacccgggcacttgatcttccgcaccctcggagctgccctgggaagtcgaaacaagtctgggcgcccggactgcggagactggaaagcagggggcggagggcgggagactgggggcgggaagtggaggtgcaggctgcagctggggaccgcggtgggcgttggaggggagggtctgtgtgcgcggctgtcctccagcgctgggggagcggacgggccaggggcctctagggaagcggcgctccgggaccggggtggctttcccgtctctgtgtgcgcggcgatccccacacccagctcgggcggaggagccctgagagaagcggctagctgagagtggggtgggcgttttggggaaaggtttgcgtgcgctgcggccctaccgctgctagagaagtggaagagagagagtgggcgccgggagggggtctataggcgccgcgacctaccccatctccctccacgcttgtgggggagtgagtggggaaggggctttgggagaggcggcgcgcgggcactgaggtgcatcgtgagcttcccggacttgacagcatcaaaggaaaatcctggcgagcagccagggccagcgagcgaccccagcagcagggacgcggccgtgcgagagctcgcggacaggcgagggggatcccaggggagcagctgctgcccacgggccacgggcgatgcacggagtggagaagtgaacgtggtctacaggatttctgtccggaaggtggagagcgctacaggggaatctcctcgattcctgtccgtctcgtaacttggcaaaagctcgcgccactgccctccggcctgggcgacagagcaagactccgtctcaaaaaaaaaaaaaaaaaatggcaaaagcctatcgctctttgtcgaactccccacgttccccagtcacctggctggggttcgttggtgtcaaaaccccagccttggtgccctcggtgccagcaggaccctcgcccactggctagcggaattaggcacctgcacgcgggctcctcattgccccggagtgtggggaggaaggggcttctgcatcagtctccagccaccctccttgggacacaagtggcagggccctggcgtggcttggcttcatttcatccctagtggctccaaaccgtggaattgactaaacaaatgttcaaattcgcaaaacggtctgacttccgccccaaacttgacaaggacatttctagtgaaattactctatctgtaagttttttggcacaaccatagtttgcaatttactatttttgttaaaatattttttctccaaacctaatttttttgggggtctcatcctgtttatcttctgttcgttaagtgacatctttctttcttttttttttttctttgagactgagtttcgctcttgtggcccaggctggagtgcaatggcgcgatctcggctcactgcaacctccgcctcctgggttcaagagattttcctgcctcagcctcccaagtagctggggctgggattacaggcatgcgccaccactcccggctaattttttgtatttttagtggagacggggtttctccatgttggtcaggctggtcttgaactcccggcctcaggtgatccgcctgcctccgcctcccaaagttctgggattacaggagtgagccactgcgcctggccataagtgacatctttcttatcacgtattagtaacgcatatgagaggcagtgttgccaaaccagtgggagtcttgagctctgtaactgggttcagatcccaacctaactgcataaacttggactagttacttatcctctctgggcgttagtttcatcatctgtgaaatgggggtaataagagcacctacctcggcagctcagcagagcacggtggctcactcctgtaatctcagcactttgggaggccgaggcaggtggatcacgtgaggtcaggagttctaggccagcctggccaacatggtgaaaccccatctctactaaaaatacaaaaaattagccgggtgtggttgctggcgcctgtaatcccagttactctgggggctgaggcaggagaattgcttgaactcaggaggcagaggttgcagtgagccgagatggagccactgcactccagcctgggcaacaagagcaaaactccgtctcaaaaaaaaaaaaagagtatctacctaatgtgctagctgacagcattcagtaaattaataacatagagctcttataacgggatggcacataccaagcaaaagctgttattactattattatattgatgctaaattggctagacttcaaactataaataagatcagtaacagaatgcatatttttgtatactataaagagtatgcataatgaaacacatgtccatcatccaaattagaaaaacagtcttttttttttttttttttttttgatgctgggtctcactctctcacccaggctggagtgcagtggcacgactgaggcccactgcacccttgaactcccagattcaaaggatcctcccacctcagcctcaggagtagctgagacttaaggtgcctgccaccgcacctggctaattttttaattttttatagagacaggatctcgctgtgttgccagggctgatgaacagccagtttaagagaatctgaaaatgtaccttaggagcttgaagtgctaacttgtctgagatcactgtaaacgttttagctgaaacaccccttatatcaaaaatacagaatgatgaaaatcaggttacttattctacctccttcgttttacagatgaggaaacattcagagaggttaagggtctgggccagagatctccagctaattaggggccaaaatagaatgaagacttctgactcattccccagggctcttacacaccacactgctgatttcctgtttactacggattaatgaactgttaacagatagaaagtataaataaggaaaaagtgtacgagcatgtgctatctctagcaccaagaaggaccaggcagtcatgtcgtggctactgttgtcccacagctttatcttggtccctcacattataagacatgaccacatgactcgcctcaggtaaggtaaggtcacagatcaagctattgtcagagccagcattagcattttaggccccacttgggtatacatttgattgcatattctattaatctcctgtagcagttttagaaatcatttttgagcttttcttgaattcttaaaatatccttccagctggctttgaaggtctttcctataagaaagccttttagaaaacgccttcaaaattacacagaaggagattttattattctagattttatggactagcgagagtaaaagagaaaagctttcttattttaatgcagtagcctgtaactggtttcattccaggcattaagtattaattcctgaaatcctgctgttcttttatttccgcatgtgggcatctaaccacattcaccttccatggacagatgcagatagtggcttaaaggtccagccctcacatccacagtttaagaattatacagcagaggccgggcgcggtggctcacgcctgtaatcccagcactttgggaggccgaggcgggtggatcacgaggtcaggacatcgagaccatcctggctaatgcggtgaaaccccgtctctactaaaaaatacaaaaaattagctgggcgtattagcgggcgtctgtagtaccagctactcgggaggctgaagcaggagaatggcatgaacctgggaggcggggcttgcagtgacccgagattgcgccactgcactccagtctgggcgacagagggagactccgtctcaaaaaaaaaaatgaattatacggcagagactttctagtgaacatctggtcttacaaagttatttatagggatggtgtgtcttccaggggaggtacttctaggaattatgcctgcatccttgaaaaaggaaaccgtggttttttccagtgtgtgaactggatactgagtatcttactcttttttttttttttttttttttgactccaagaaacctcttgcatgaataccctactcttgaatactttgcatcttgggatacttactacatgttcttagacagaaggacagggcattaagaagggagtgactttctagcatgctcccaagccagtttggcagaacttagttttgaaatcacatgtgtcaagttaggtcccaatatgattataatgtgaatcactgtccaattgggaatatttcagattggttttcagtgcaccaccaggtgactcacaatgtgagcttctattcaaacaagtacagtgtcagtcagcaactaatagggctcactctgagtcagagcttagcatttagtacaataagtgggagtcactgactacacggcaccatctgagatggtccctgaatgttactttgcgcagctagctcaagagttaaggcgacgctgcttggagtgagtcagttcatagtacaattgaatgggctcttggagaggccattcacaatcaagtttgatgtggctgagtgctcagagtaatattacatgattataaattcatggagtagattaccttgattctaatccagctgattagagtctagctatttgcatagggaatcacttgtgaaatatgagtaatatgctctgttgcccagcagtgatattttacatgagttatttcaatagttattaaagccagttgacctttttgattttgaaagctcaatttctagttacgcatttattttattctaaagtgtaaaatccttttcatgtgagcatttgggttttaggcaaaggcatctcatgcaaagttatctgatagcttggcttcctgaggtgctgggttgtacgatgtgcacctccgtccaacagtgaaggagtggagaacgccctgctatctggtttgtctacatttgtgcccctctgaagctgactgaattgtggttgttcaaggctggagcacaagtttgtactgctgctcttagactaaggacactggggactttaacccttttagggctgaatggctagaatcaacacttatacagctgttgaatttttgcaacattggaaagaattatgtaacctactccttacctcacccttataatggacttttatgtctcagggtggggtgataatgtgatttaagggactcgtagatttctttctttctttcttttcatgtcttttattaactaatacacaattacttgtcttctggtttgttgaagcaataaatcagacaacattagccacaataatgcctgtcagagtggctggccataaaaactccagcaccgcattcatctgaagggcactcccagcgaaggccactaattctgccattttcatccaccttatagtatttcaggacacccacttcaccttctttctcttatgcttattcttgggagtcgtgtaagatttcttcctagttttagcactaccatgaagtctcaacacaacataaaaagagtaaattccttttgaatgttgtagtcagagaaagttatgtccatcttccagttacttgccagcttccagtcacttgtctttgctgatcaggaggaattcgttccttatcctggatattggcctttacatttttctgttgtatccaagggttcaacctctagggtgatgatcgtccctgtaaggatttttggaaaaatctgcattttggtggaggctccacctgaggttgagggaaatgaagagatgggttagactgtggacacaagagaggtgacacaggagagggtgctggccagagagcagcccaagagcacacgcccatagatttcttaatttgtataaaagtcatgttgataattaatgacaggaagtcattatccagagaactcagattagactactgttaaaaagtacatgtggccaggcgtggtggctcacgcctgtaattcccacactttaggaggccaagacgggtggatcacttgagcccaggagttccagaccagcctgggcaacatagtgaaaccccgtctctttaaaaaatgcaaaaaattagctgggtgtggtggtgcacacctgtagtcccagctacttgggaggctgaggctggagaatcacctgagcctggggacactgaggttgcagtgggccatgatcttgcctctgccctccagcctgggcaacagagtgagaccctgacttaaaaaaaaaaaaggtatatgtatatttttctctattcatcttttgatgactccagaagaatcttacatgtatggggtcttccattatacattcattgtgtttttacaaatacttatttctagtgactacccagatataattcatatatctcctgccataaagaaaggtatagatatttctttgcatttaagggggactttacatacagagtttaattcttcctgacctactataatccccgcaaatttcagttgttaggactgtttaatgaattagagtatttctaaaactgaaacaaagtttttctgtgtttgttaggtttcagtgaggagctatttggtatttttgtgaggtttatgacagcttttaacttcatttacttgagttataacttacagtaaagtttacacatcttaagagtacagcttagtaaactttatgtaagtgtacccccacagaaccaccatttagatcagggtttctcacctcagcactgtggaaatttggggttgaacaactccttattgaggggggctgtccattgccctgtaggatgtttagcagtatccctgatctccacccactgcatgatgcagtagcgcccctccctggatgccatgaccaaaaatgtctctagacattgccaagcgtcctctggggccaaaatcactcaccacggctctagatgaagatataggatattttcagccccccgtgctctcccaaagattccgtctcgcttccttccattcaggactcactcccacaggtaaccacttttataacttttttcaccatataccaattgtgcctgcttttaaacttcatatgtaattaaacagtgtataatatttgcatctggttctttagctcagcattatgtttttgagattcatttgttgttgtacgtgttgttattttttaatgctgtgcagcgttcctttgtgtgaatacaccacagtgtattccattccactactgaagaaattttagttgtttccagtgtggagctattatgaataatgctaatatgaacattctcattcatgtcttttgatgaacttatttcctttgggtatatgcccaggataaaaattgttgggtaataagtccagtgtatgtttagctttagtagatactgcaaaactgtttcatagtccaaatcagtttacatccatccccaccagcaaagtgtgtattgcttcacatcctcaccagtacttagtattgtttgcccatttaactttagtcattctggtggctgtgtagtggtatctcattatggttttaatttgtatttccctggctactaatgatgttaagcatcttcttatatgtttttgggtcaagtcatttgtatattttctatttaaaatgcctctacaagcctttggcccatttttctttttctttctttctttctctctctctctctttttttttttttttttttttttttttttttttttttttgagacagggtctcactctgttgcccaggctggaaggcagtggcacaattagccgtgaagctgagactataggtgtccaccaccacactcaactaatttttttattttggatattgggaaggggtagagatggggtttcaccatgttgcccaggctggtcttgaacttctgtttggcccatttttctattgtgccgctgatcttttattattgttattattgatctgtcacagttctttatatattctggatacaagccatctgtcaaaattctgtgtgtgtgtgtgtgtgtgtgtgtgtgtgtgtgcacgtgctgcaaatctcttcttccagtctggcctgcctttacactctcattccattatcttttgactttcctagtttctgttggaaagttatgcttctttgaaggtagcctgttgttatcctcataaagtttttctctcatttttgacttaccacagtgaatataatgtgcctatatgtggttttcattttatttattctcctttgggttaactgagcttcttttatctgtggattgacgtctttcatcaactttggaaaattttcactcaatatctcttcaaatatggctttgtctggttttctttctttctctcctgcttctgggacccaaatcacagatatgttggcctttttccttcatgtctcttattgtctgatctgttttgttcatttcgcatatctttctgcttcaatttgaatattttctgttgacctgtgttttagttaattaagctgtcttcctctgtgcctgagtcttctgtcaaatcatctagtgagttattaatttcagaacttgttttcttctaaatgtagtatgccaatttgattcattttaatacatttaaattatctgatgaaatttcccatcttttcatcagtttagtccatctaattcttatctactaaatccaatgagatcatctgtgtgcctgtatccatttttttattcatcacatttttatctctcttcacatatctagtaatttttattatatgtagacattgtatataaagaaactgtgtaggttctggtaatttcttccaccagcaaggattgaatctcccttggagggatttcctgtctaaggatgaaggactgaagggctgatcacttcaggccagcaggtattagaatgggtcagatctggtaacagttttgggggtttttttgttttgacatggaatctccctctgtcacccctagaatggagtacattggcaccattataacctagaattcctgggctcaagcagtcctcccacttcaacctcctgagtagctgggattacaggcacttgccaattcacctgaccattttttacaaatgttttgtagagatggggtctcgctatgttacccagactggtggctgcagttttaataagatttagctaatgcccagttctttcttgttccttgggaattttctcttggattccagaatgaaagcctgatggacttctatctccttggtctcaaaagaatggaagactcagtcttgccttcagaggttttaagtttgttctttgcctccaccttccccatatggccgccacatttgataaatgtcttgtaggacccagccatgtgtttgaggaagtccttgttactgaaggggacttgttctgccacatgagaaaagagtccctttatgtccacagcttgtgctaacggtcagcaaaagccctcaggaaaaaaacagctagtgacagacagctcagcttggaagaactctcttactcagaaattttagtttatataatatttttgctttcacagttctctgatgactttagaaatgtaatttcacttatttatctgagttttttagttgttgcataagaatagtgatttgggccaggcgcagtggctcatgcctttaatcccagcactttgggaggccaaggtgggtggatcacttgaggtcaggatttcgagaccagcctggccaacatagcaaaacctcatctctactaaaaatgcaaaaaaattagccaggtgtggtggcgtgtgcctgtagtcccagctactcaggaggctgaggcaggagaatcgcttgaacccgggaggcagagattgcagtgagccaagatcatgccagtgcactctagcctgggtgacagagcaggattctgtctaaaaaaaaaagtgatctgccttgacctattgacatttttcttgaattaattttctgtgtattacattgttatctttcttttatatcatttgtttccaatgtaattcagaaaatgtgtatttaaaaatttgccatttgtgagtgtaaaatgtaatacatgttttgtcagtttgaaaacactggaaagaaaagaagtatgttataatttttgcaactttttttttttggtcagtcccttcatctaggcagcctaggcccagatttttttttaaattattattattattacactttaagttttagggtacatgtgcacaatgtgcaggttagttacatatgtatacatgtgccatgctggtgtgctgcacccattaactcgtcatttagcattaggtatatctcctaatgctatccctcccctctccccacaccccacaacagtccccggagtgtgatgttccccttcctgtgtccatgtgttctcattgttcagttcccacctatgagtgagaacatgcggtgtttggttttttgtccttgtgatagtttactgagaatgatgatttccagtttcatccatgtccctacaaaggacacgaactcatcattttttatggctgcatagtattccatggtgtatatgtgccacattttcttaatccagtctatcattgttggacatttgggttggttccaagtctttgctattgtgaatagtgccgcaataaacatacatgtgcatgtgtctttatagcagcatgattacactgttggtgggactgtaaactagttcaaccattgtggaagtcagtgtggcgattcctcagggatctagaactagaaataccatttgacccagccatcccattattgggtatatacccaaaggactataaatcatgcaactctttatgcttcagattgcagttatgtaatgtaaaaagcatgagtattggaatgaaagagaactaggctcaaactttgactttgatcattagttttgtgagcctctgaatttgaatgtgtatagcagtgataagaatacttgctttaacgtaatacatgtacagcagagggttcaagagagtatcagtaagtggtacctcttgccaatattctcctaatatttatcattattttaagcccctgaccatgtataatttgattttaaacatttatattttgatatatttctatttggtacagtttctaaaattttcaccatttgaacaatgttcttttaaaaaaacttaatataaaagacctgtaccatgacttaatatccaggaaaaatattactaataagtttatgaattcatatttggcctaatctttgtcacttgtagacccccaaaaaatgacctcctgaaactgaagaatttagataaaatttagttgcagaaagaattgcattcagaatagtcactctcagtaaaatccacatttaactacttcgtgttatatcaagtagggcttataataagatattggcaataagaaaacaatattaaaaaatattaagaaaaggctaacagtattttctggaaagaatagctggttgacctttgcagaggaaagtctatgtggagactgtaattttaacattatctccatgaatgatttaaatataattaattttcatattagatttcctgttgccaagttgctcttttattttgactatggcatttgcttcttgaaaaaaaaatactatattaatatatagaaatagttagattctactctaaagctgagatgaaaatagtaaacctggaggcggagtagcaggactctcctgacctgggccaggaggacagcactgatgtgtgtgtccccaaggccttggacttatctcagtctcacctgtcatctcactcttattatctcagcctttagttccttactttgatgacagccagcttcagtgacagccggctttgctctctgacctccgtattctgaggactgctctccttaccatttgtgggcagatttaagtcaaagcataagagtgaggggatctagttatgcaacaacctgaaatttatcaaattctcactagagctaagtttttgccaaacacataagttgccttcggccccttgagtgactggttaggcagtgctgttcttttggcaaaatgaaatacttattaacaaaaacaccagaacatcataaccagaccacatagaataaatttggcttaaaggatgaaagagtactaagaagtataaaaaggataaaattatgcaaaatctagtaaagcgaaaaactcacccgagcatgttaaacaaatgtcataaactaaacaaaaggctttatttcttttctttatcttctagtgatctgtgttcaaaatcataaaggcatttatgaaaagtataaatactaacttaggtagataaaacatttgttaaaatctatcaagtctggtctgataattaggaggctacatatagcttatattttcttaattgaaacaggtcccctatgtgccattttacccaatacgttagtatggaggtttttgtcctgggtctctgtgtccaactgccttgttttgtcttactgaaaggttataaatgctatggttccctgcgaagagtccaaagcgcataaccactgaacatttcaagtctgaaatttcttcaattttagatctgtttgttcaacatatctactatttgacacttcacaccaagggggagggagatctaaaattcagtagatattttggtgcaaactgtagaaaactaaaacctcgaggagcagagattctcccatgcacatcctaggaactgcagacaaaaacattctgtcagcttagcccagagaactgtcttgggaatgctaaggccctgtgggacaacgtaatgccctggagtttctattagcccactcgaatcaacagcagaccttctgggaaaaggactccagaagacttcactgatgggcctacacaaataatccaaatccatcgaatgtggcccatgtgcagctgtggtatgaggggcacagttctgtggggtgacagatgcatccatgccttgaaccacatgatctagattcaagtctgtttggggctgactgaatgtcaggcacattaggcaacctccctgaagctgagttttccctattaataaatgggatctcaaaatctccacaaaatcatttcacatattaaatgtaagatgtgatacatttgctcatgtaaacataggggaaaattgtgcaatatttagaccctgatagagtttggattttttctagtgtcaggatttgccattgaagcccacaggaggggactaacaggatctggattctattttaaaagagttagtaaatattttaggcttgtgggtcattgcaattactcacctctgctactgtagcagaaagctgtgcggggagagggaaggaggtggatatgggacttatcgtagccatcgagacaagagatggggccgccagcctaggagaagtagcggggatgcagtgcaggcctggcgtgagtcctggagatgcagtgagcttgctaatgagtgatgcatgaggaatcaaggtgacttcttgatgtaggtggatggtggcaacatgtgtggccatggagaagacaggaggtgaaacagaggggctggaggaggagatgcaagattccatgttagaccctagagatgtccaggagagctccaactgtggtgccaggcagctggttggatctgtgtgtatggcacccagggaatggcctgggctagaggcagaaatgtggattcgttaggctctgatgatgtgcagcctgctgtactgtggtacgctaaatgatcatgaagttatggtgggaagccttgaaaataatcagtaggatcttactactttagaatctgcgcttccttttctcaattatccataaacagtctatgaagaatttctgtttatgacaggggtcagcaaacaaggcacagggccacctccagccctctgcctgcttttgtatgccctgaacactaataatagtttttctttttattccttttttttttttttgagacagggtcttgttctgttgcccaggctggagtgcagtggcgggatctcggctcactgcaacctctgcctcccaggttcaagcagttctcttgccttagcctcttgagtagctgggactacaggcacccggaaccatgcctggctaatttccttgtatttttagtagaaatagggtttcaccatgttggtcagagttgtttcaaactcctgacctcaaatgatctgcccgcctcggcctcccaaagtgctgggtttacaggcatgagccaccacgcccagccaagaatggtttttacattttttaattgttgggagaaaaagtgagaagaataaggccagacatgatggctcatgcctgtaatcccagcactttgggaggccaaagcgagagaatctcttgaggttgggagtttgaaaccagcctgggcaacaaagcaagaccctgcctctgcaaaaagtaaaaaattagccaagtgtggtggcatgagccttagtccctgctactcaggaggctgatgcaggaggatcacttgagcccaggaggttgaggctgcagtgggccatggattgcaccactgcactccaacctgtgtgacagagtgagatgctgtcccccccaaaaaaagaagaatattttgtgacacatgaaaattttacagaattcagatttcagcattcataaagatttattggagcacagccatgctcatttgtttgatgtttgagctgcctttgtgatatagaggcagaattgagtagttgcagacagaccaggaggcctgcaaagtgtgcaatatgtatgctctggtccctcactgaaaacatttgtctacctctggactatagcataaatataagtgtggggtattactaagtttttgtaggaaacaatctgtatgaaagtaaatacgaagttcaagcaatgacagttttaattcttatagaatagtctactctttaaaaaaatttcaaaagacagaccagaaaaccaattaaaggcaatctcctataggaaataaaatcaaaggacccaacttaagattcctttgggtatgcactatttcaacattcagcattttcatattaacaggaaaacttagtagcaattaacaagccccaaaaggactaatgaagaaggaccacagggaaataatatgcacaaaggttttgtggctgagagagctcagatggctttcagagatttcaaattacttacagcttgaaagctttaaatagaataggagcttgctatttcataccattatcatagaagaatcatcccaggataaaaaattctaataatggacaaaagacaaagtttgaggagccaatgctactgtccacgggggatcatagagaattttctatgggcaaaagtggaatttgtgaaaaaagaaatgtagagggaaaatttgcccagacattcctgtaagaagtagagaaagctagttagtcacttataaacacatcttttgtacatttttatccttaatttgcatgtacgttgacacattccataacccatctgctgtaattgatggagaggaacttcttcagcaaatattcatccaggcctaatgtctgttaagatttgtgcccagcacaagcagactgggctagggctgccctggcagactggaccagactagaggtggattcctgcagcactgggtaaggccctgctctcacttgtggtcaaacttggatgccctgtccataagagtttccttagttccagctaataatttaggggcaatggtaggaagcatcagtagaaatgttattcattaaagacagttcaaataaaaatgaatgttacttttaaggaacttatcttttactaagcatactttataatatccatatagtaaccacaatacatttgtcatacccaacaaaattaacagtaagcaattcacatcatctaatgtgtaaccatagtacattctttcttattagcctctttactaatcttcctcatcatccatcttctttttcatacgccaacttgaagaaattggacctgctgccccgtcgattgtcccacattgaattcatttgctgctttctcaagttgctaacttgttcctgtattccctaaatttctgcaaactagaggttagactcaaaggctcaaataaattcctgttgcatcacatcagagggacacaatgtctgcaaaattggctcgcttttagttatggaaaggacattatttctaaaagcttggtaggtcagtccaaattatacagagcggctgataggtccaaggcatgtggggcacacactgcaaaggcaacaggtgctactcttactacagctgccttctgcttgctgaaagagcttgagtgtccactccgggccatactttgggagctctgttcctcagcagggctggaatgcctccttgatggctgtggggctggatcccacccgctcgccttgcaccaccaggagctgctgctctgcctccccctggctataattccctgcctgacttgaggagtggtggtgatgatgatgatgatgatgaggttgtgtttcccttctgcactgttaatttggagaatgttccaggtgaggaaaatgcatcaccttcagaggataccagatgttacccagaccactgtcctggtattgagggtactcagagtgtacctagaagtaggtgtggccattagggagcacagaaggagtgttaccctttttcttttgggaggctgtgttccttccaccacatcagaaccaaagaagaaactggcctcctcctaatgctccattgccttcaccattacttccatataataaccttgtggcactttaacagaagtgtggatttgtggaggatttaaattcatatcaaatgtcaattcacattttttagggttatattgaagcatgcataacacatgatatcctgtgggctctagattacttagatttcaaaaccagagatagaaatgaaatatgtatgagattgaatacagtaagggcttatgtggcattaattgcacatatttattgttttctctattaaataaaagctgaactgtaattagttaagccagatgcatttctgtttttccagatgcactgtgggaacccacttttccacctggtgaatgttgaaaagactataaatacaataattctctaggccaaggagcactgcaggtgcttttaaccaaggaaagagtttgcatttctgatctttgtactgacgtatgcctatgaaagaaaacactgaaatgctatgtaacgtgactggcatgttcatttgcatttcacactgtagcatgatggtcagggaaactattttcatggcacattattgttcaaatacatattaaaatttctgctgttaggaactttatgttcccagctgtgatgtgttaacagcatttccttcagaagtcaggcagctggcccccacactaactacaatgctgtgcgatgctcctgtgtctgtcctcctggcaccacaatgcctgtgtgccatgtttgtcaccagcatgctacatgtgctatgtccactgccttttgtctctctattctctttattgggtattttttccttccttttctcaggtgtctcaggtttaagtcacagaatcatgactttatggaacagaaaggggaacgacttagccaacagcagcccagagcaggcagctgacttatgtcaggcgaacaagttagtgacagaacagaactcacaacctgcatttctgtactttttggtactcaatccactatgctgcctttaaggtaaattaaaataccagcatttaaaaactgttttatgacatccattcatagagatgtgtaaccatcactgcaattcattttagaatattttcatcactccaagaagagacccagcaccccttagccgtcaaccaccaagtcccttcctccagcagccccaggcagccactgagctactttctgtttccacagatttgcctgttccgaacattttatatagatgggttcatatgatacgtggccttttctagctggcttctctcactcagcatcctgtttgcacagttcagccatgtagtggtaggtaaccatggcatgtcagaaagagaagaaaaacttggtggtcattttgcctccagttcagaagacaaaaccaaggcctagggaggtggcttcaggctctagtcacaaagcccagcaggggaagagtgaggatccagctagacccctcaccactcaccgccctcagcagacctcctggtgcttccctgacctgcgtgcaaaggtgctctgcttggtgaactggcagatttacatgcctgccctctagtttttctgttctcagctttgcccagctatttttgtcaccgcttgcgtgtccttgaaggcattctgggttacttctagatttgtgaatggttgaggtgccagatgtctgagggtgggtaaatggggtccctgctatttcagtccctgctgaatatagacacaaaggtacaggaccaatttgtttacagtctttttttcccctaggttagaatgcagtggtgcaatcatagctcactgcagccttaaacccctgggctcaaacgatcctcccacctcagcctcctgaataggtggaactacaggtgtgtgccaccatgcctggctgatttttaaattttttttagagacggggtctcactatgttgcccaggctggtctcaaactcctggacttaagccatccacctgcctcagcctcccaaagtgctgagattacagttgtgagccactgtacccagccttgtttacaatcttaaaacacctataaggtctttctatattactcatcgtatttttacattaaatatcaatgtttatatagcaagaaatgtaaacaaaaaataaaatatcaataagtactaaatttaaagaaataaggcaccagagtagcacctagttttcagagacctttcacatacattctctcatttaatcctcttaacaaatctcaaggcagctaatgttatacacatgaggacgtggaggcttaggaaggtgaagtaatttggtccaggcctcacaagtggcaaaggtcaggatggcagggctcctctgactggacaccctatgctctcctcccgctattgcaccagactgctggacattcctggcccagttctctgttttaagcgagtgttctctagggaccagctgtgggccagaaggtcagcacagcactcagaggactcctccaagtaaacccaatattcccactcggccctctgaccccagtcacggcagggctgttcacgtcctgacctggctccatgggacactcctccacacccctcacagcatcccactgtactctctcgacctcggtctaccaacagcaacatgccctggccttcatacttgtctctttttttttttttttttttgagatggagtcttgctctatcacccaggctggagtgcagtggcgcaatcaatctcagctcactacaacctccgccttgcaagttcaagtgattctcctgcttcagcctcccgagtagctgggactacagatgcccgtcaccacgcccggctaatttttgtatttttagtagagatggggtttcaccatgttggtcaggctggtctcgagctcctgacctcaagtgatccacccgccttggcctcccaaagtgttaggattacaggcgtgaaccaccgcgcccagcctatacttgtctcttaatgtctctttctgtttcatctctcactgggatctggctagtctttgagaacattgccttccctatggccctggtagttagagacatttccccacagaaattctgccacttcagggcttagaagtaaggtaggtgtctctgctgtctattgccacttctaaaacattccttctctgaaaaaccgcacctcttaaattctgacacatgctacaaagatggttgaaccttcaggacattatgctgaaggaaataagccagacacaaaaggacagatactatatgatttcacttatatgaggtacttagagtagtcaaaattatggagacagagctggcacgcacctgtagtccgagctacttgggaggctgaggcaggagaattgctccaacccaggggtttgaggctgcagtggtatgatcatgcctccaaatagccactgcactccactgtgggcaacagagtgagaccctgtcccttaaaaaaggaaaacattatagagatagaatagaatgcagaatggcagttgccaacatcattggtgagattaatccacttattgaggtagttggagattgttcattctcatcgctgaataatatcccattatataaacacattcacttatccattctactttttatttttttttctttgagtcagggtctcgctctgtcacccaggctgaagtacagtgatgcgacctggactcaccacaacctctgcctcctggacccaaggaattctcccacctaagcctcctgagtagctgggactaggcgcatgtcaccacatccagctaatttttgcttctttttgtagagacagggttttgccatgttgcccaggccggtctcaactccacccgctgtgtcctcccaaagtgctgggattacaggcatgagccactgtgcctagccccattctactattgatgaacatttgaatagtttttgactattatgtgtagaacatcctaatgcatacttttggtgcaacgttctcagggagtatataccaaggcctggaatggctgggtcagagggtgtgtatggggtcagccaaaacacattctgtgagtgttcctaactggttacaccaatttacactcccatcagcggtgcgggagagttctggttgctctctatccttcctctctatctttctcatcacttggcatttccttcattattttagctgctcttttgtgtggggatgtgcatgccattccctgtctatgcatagttgcaatatttgcactggctcattacactgaccaataggttatggatactgctgtgaaaatgaagaaaaagataagcttttaaatgtaaaaacaaaatgattggttctttttttttttggagacggagtctccctctgtcgcccaggctagagtgcagtggcacgatctcggctcacagcaacctctgcctcccggattcaagtaattctcctgcctcagcttcccgagtagctgggattacaggccctcgccaccatgctcggttaatttctgtatttttagtagagacaggatttcgccatgatggccaggctgggctcgaacttctgacctcgggggatctgcccacctcgacctcccaaagtgctgggatcacaggtgtgagccacccgtgcccagcccaaaatgattgattcttatatttttgacagagagatcagatggatcagttcatactctggcagttaattttatttcctctaaataaaaatggacaggttaatttattaagcagctgtgttatcaatatggtacgtgtgtgtgcttgtatagatagatgtatatgtacatacataactatacatttttctggacacataatattttaggtgcctattgtatgctagacactgttctaccatcagtaaaaaagcactgccctgttttactgttgattaaaaacaaaattctgaaaatagtgaacaatgaggcttacaacatttgttacaggataagaaatctcaatttagaaaaatgttgtcaactttgactaacctggaatgctcgttacacagtcctgaaattaattttgatcctaatctggctatagctgcaccccagccagccaccttccacagcagttaggtccctgacaggagacggcacccaggaagccacaaagagcaaactggtttctgcccaggatctctgccagctctgcagccttggtgatgtcacttacacagctcagcactctccatgcttcttcccagcctgagccaagcagcatcagggaacttgttcttctgtcccttggccttgcctaccccacctttcacaatgaaaggtatttcccaagaaaagcacactcaccctaaagccaggtccctccctaccaagtctcagcactagatgctgcttcagaaggagaagcagagcagaaagaccatagagggaagaagggtatttgcggtcttcttacagctcctaccagaattttaccttttatccaaggtgagaatggaggcagagtgagtggctgggagacctccaccattatccagacctgagatgttaactagggccatatcacgtggagaagaacagggcagatgtgagaggcatgctgggagacagattgcctttgcctttgccaggagttaggattgggaggagttgaggatgatgagttttcttgaacaactggagagatagtaacactgcttaccaagagagaaaaaacaagaaggggtagctttgtctggggagataataactttgcttttttttttttttttaaccaagtctcactctgtcacccaggctggagtgtagtggtgtgatctctgctcactgcaacctccgcatcccaggttcaagtgattctcctgcctcaccctcccaagtagctgaagtagctgggattacaggtgcctgccaccacacttggctaatttttatatttttagtagagatgggatttcgccatgttggccaggctggtctcgaactcctgacctcaagtgatccttctgccttggcctcccaaagtgctaggattacaggcgtgagccaccacacctggccacaactttgatttttgacattaatttttctatgatgtaagtgatttggctgtttttttctataatttgcaataactacgcagaaattctcattagggagcctgctccttgctgggaaacagtaaatagctggccattctcatgcaaaccattaatgatggcctcatatattcctcagccatttgaagagtccctaaagcagccccacagacaaagattttcccaagtgtttaatactttcagaggtgccctgggccaagttatcactgggaatgcaccccagctgcaattttcttgagaatgccactatttcctgggataagcaaagctcttaataaagatttcaatcagtacttacaaaatggtccttcgttgttggctgacattaggaaagaacaaataaaaacatacataatttatttatttccttcatatcatactctcttctttctaatacttcccaaaaggccattgtaaaagttgagttatataggatgttcatttagtaatggcagaagagaagagaaagacactcttattatagtcttaaagccttcactggcttaaaacctcctggggcttacacatttggcaacggctatataaacaaaagtgtaaagatttccatgataagtcactgaaaaacagatggtaagatgcttaagtggttttttaaaagatgaggacatctgtaagcatccatctggaagtaattataattcaaaagtcttttgttactattaagcttccagttgacttcccctactagaaaacaatggaccagctttttcttaaaatagacaataaaacccaaatagtcagacaataaaaccaaaagacagaaatttttgaaaacccatagatttgcctggaagcaaagtttagaatttccacaaaaatccaccagctactaaactgttggctttctgtatcaaacatagtggaaatagagctttgatttgattttttggtctatttgtgctgaagtcagtgcaagtaattctagctcttcattaatatttcatgagccacagtgagatggacttttgtctggtgatgactatactgcaggataatgggccagcgtcctctcaaacttagaatcgcctcatctcagcatcctactaaacagaacatcactgttgaccagcattcagcttacgtctcggctgctaatagtaacagggcctgtttgtgacttcagcagcatctggtgacccggtgttactcttgcagtacgtgattcagagaaagccacattcccctgttgctattttcaggtaggcagctaaacccagggagagtttagcatggattcagcaggtctgtttttctaacttcattgtgtaaattcttgaatgagaatctagcgagcagccaaaaaaagacttcctgtgaactcatcttccttgaagccaaacatcttcagaaactgtttccttcaggttctggaagcctagagcccttcaaatgagatttgtccctctccccaacacactttatgcctcctgtccccagccaaatggcttttccatccttttcctcctcccgttcattcgacttccagttctgtctgaagtcagaggcatgcatggggctgagaggggcctgggtcacagggtccccctcctccacccacaagtgaacatccaactttaagaccaagtatttaagaccagaggatcctacaaaaaactcactcaggccaggcgcggtggttcatgcttgtaatcccagcattttgggaggctgaggcgggcggatcacgacctcgtccctactaaaaatacaaaaaattagccgagcatggtggcacgtgcctacagtcctagctatttgggaggctaaagcaggagaatcacttgaacccgggaggtggaggttgcagtgagccgagacagcacccctgcactccagcctgggtgacagagcaagactccatctcaaaaaaagaaaaaaaaacaactcactcaaccctctgctactttgctatcgagtggccccctaagtgtgctggcaaatgtggtatctgtgaaaaatcatcctccatccaaggcaaaatagtattagagaaagatttcccaggcaggggaaacctagaaggcaggacgacctagaggagggtaaaattaggagtaaattgaaacacgttgtgttaaatactcagaaacattactgcagagaacaaggaaatgagagtgtctcttgaggctgcagtacaggaggatattcctggaatatcgcagtgcttttcatgcacctgggaaccacagtcagtgggagctcagaaaacagtgaaattgaaatgaatgaggctcatgaggaaaggagttttgttcttaatgtggaacagcaacaaagacccaatcgtttgaacaggcttaaaaaagtactgggagagatatgtatagggcacaactgagggactaaggtaaaatcatagcatcccagtgcaatgcaaggggaaggcttacagctgagagttaggagggagactcccttgtttgtgtccatctgctatagttggtatattggggattaccaaagctgtaaaatccccagacatagctctctggcttcacgttccaccccattttaatgtcattagtcatttcttcaatgtgaaagcagaaagaaatgtcccatcaattaactctgtagcatatcgtaacaaaaatctgggagaagcaatggagctaagtggccgggtggcttggtatcagagctgccttcacactggtcccattcttccttatctcagataacaaagcatgcagattcctcctgcttgtgaaccacattttttttctgaagcatttgatgttttctatgtcttgttagccttcctgtatctattaagatttaaagaatcttggctgggcgcggtggctcacgcctgtaataccagcactttgagaggccgaggtgggcagatcacgagatcaggagttcaagaccagcctggccaacatggtgaaatctgtctctactgaaaatataaacattagcttggcatggtggcacgagcctgtaatcccagctactcaggaggctgaggcaggagaattgcttgaacccaggaggctgaggttgcagtgagccaagattgccccattgcactctagctctgggtgacagagcaagactccatctcaggaaaaaaaaaaagatttaaagaatctttccaaaatatttaaagagtaagagagacgctcttggggatgaggagtggcggggcaggtaatgattctcctgggaggccagaggccaggctaacaggctcctgcatctcatggcttcttaggatcccagaaaatgaatggcaagcttacactttgcattttagaggggtaggaaatgaggggccaaaagatttaaccaggatacagattaagtttaaaggtcattaccggctaccgtgtctaagggtgaggtttgggattcctgcctttgtgtcattgtgcagccatcagaggtaggaggtacggtcaccctgaccctgaaatactcacaatgccagcccagaaaaaatccatctagaagtgcattctgcagggtagagtctcgggttcaatgaagttgtgaggcaggtgatgaaaggtcaaagctgcctgacgcattcatgatgcttgacagagagcgctcaatctgaagatcattgacagtgaaactattgaaaacggcatatgcatatggaacaaaaagatggaaaacgttgggagatgggataatgggtgattaactcttagaaatgttctttatagaacattgaaagcaaaaaataaaggcaggcacatgcagacaaggcagctatggaaaggaagtcatgaaagttagaagcaatagttggaataaagcaatagataatggagatacagaaaagtaaaacactggacttgccgagctactaaaacttatacagactgctgctgggagcggtgattcatgcctggaatcctagcactttgggagcccaagctgagttgattacttgagcccaggagtttgagaccagcctgggccacatggtgaaaccctgcctctattcataatacaaaaattagccaggcatagtggcaggtgcctgtaatcccagctactcgggaggctgaggcaggataatctcttcaacctgggaggcagaagttgcagtgagctgagatcatgccattgcactccagcctgggcaacaagagtgaaactccatctcaaaaaaaaaaaaattagctgggtgcagtggctcacacctgtggtcccagctactcaggaggctgaggtgggaggatcacctgaggcccaggaggcggaggtagcagtgagctataattgcaccaccacactccagcctgggtgacagggtgagaccctgtctcaagataaataaataaataaacaaactatcatatcaacacagaaagttataaagcagcattcaaaatcatatatatactcttgtaatcatgtaaataatttttgtgaacaaagggaaggaaatgcaaaataaaatttaaaatattggcatgatggatttatggcatgttattctttttaaaaatatacttggtaacagttgttgagcatttaataattccaggcactatgtgaggattttacatgaattatcatatttattcctcccagcaaccccatgagccagatactattattttcctgatttgacacagagaagttggggtgacctgcctgtggtcatacaggtagtggtggtactgggtccatttgattctgagtactctattatccattatggtatgtgtgtatatatatatatatatatatatatatatatatatatatatatatactttttttttttgagacagggtcttactctgtcacccaggctggagagcagtggtgttatctcaattcactgtggcctctgccttccaggctccagcaatcctccagcctcagcctcccaaatagctgggactataggcccgcaccaccatatatggctaatttgttgttgttgttgttgagacagggtttccctatattacccaggctggtctcaaactcctaggctgaagtgatccgcccatggccttggtctcccaaagtgctgggattacagctgtgggccaccacacccagccccttatgctattttttttaaaggctgttattataatagtgtacaggtagatatttaaatgcatgcttatattaaaaatttggagatatattaatgttcctatggcagaatgatatcatagtcctggtacttgatattggaggtttcttgcttctggtagagaagtaacattatagaaagtagcaatacagtgggaaggaattgttgtgtgaataatgatgaaccatttctgagaatggattaaatgtgtatgatacacttgtctttgacaacttttgactgatgtggaaggacagaggtgatggaaactctaatgaggaaggaaaatgtctgctgggtgtgtattctctctctttccttctagagtcctttgtatctagagtgtctgagactggggaaatgaaggtgaccagtagatagttgaagagagcagggacaaatgccttcctgggctgggttcatacattttattaaattccctgttacattatcaaacagaaagggtaaagatgcattgagtcatgaggtaaaacacagagggatacattattagttctttaatcattcatcacatatgtattaaacacctttacataaaacagaatcaatcaaagcactattaggaacatgaagaaagccatgtagccagcaaaagtatagatgccctggtaccagcaagagcacaaagctggtatttgaggggctcttgcttcaggctatgggccaaaaaaaattaccaagaccctccaccaaggaagaggtacccatagcagataatacatgaaaagatgttcaacattatcagtcaagagggaaatgcaaattaaacccaccatgagctgccacttacgcctattaaaatcgccaggaaaaaaaaaatctgacaatgtcagctactgacaaggatgtggaacaattgaaactctcattcattgctggtgggaacagaaaaaagatacagctcctttgaaagacaagttggcatgttcttagaaagcgaataaacatgcacttactatgtgacccagtgagtatttacccaagaaaaatgaaaacatacacccacacaaaaatctctgcacaaatgtttatagaagctttattcataagcacccaaaacaggaaataacacaaatgtccatcagtaggtgcctggacagacagttataaccatataattgagtactactcagcagtaaacaagaatgaactactgatacacacgaccaggtgaatctcaaaagcattacgctaagtgaaagaagcccagactccaaacaatgcataccatatgatttaatttgtatgatattttggaaaaggaaaaactatcatatcaatctacaaagtaataatatacctaaacatgttaaaatcatacaggccacattttctgatcaaaatgtaaagaaacatacaaactagtcaggctagtcaagaaattaaaaataaactttaaaaaggctgtggataaaaaatctgagctgcaattagatctgaggtatttggaggtgaactattagatctgagctatttggaaataaaaatagtgctatctagcaaaactcagtggatatgatcaaagcagtaactggataaaaatttgtacttttaaacccacttattaaaaaccagcagtgactgaaagtaaatgaactaaaactttagtgtgagaggccaggagaaaagtaagccattttttaaaaagtagatgaagaataatgaaaataaaagcagaaattaatgaaatttacagttaacagaaagcaaaattgatccataaaacctaaagccaattctttggaaacagaactacagactaacctttggcaaatctgattcagataagaggatagaaaagcccaaaccatcagaaatgagttacggtgcataactggatcaagacttttttacacaaaaaccaaataacatgtacaagtttaatgccaacgtatttgaaaatcttaggtaagatagatacttttctgaaaaaatataaatttaaaatatagtcatatggtagtagaagatcctaaactacgtagaaaaaatcgaaaaggtgttatgagatttgtccctaagaaaggcatcaggccctggccaggcacggtggctcattgcctgtaatcccagcactttgggagcctgaggtgggtggatcacttgaggtcaggggttcgagatcagcctggccaacataacatggtgaaaccccatctctactaaaaatacaaaaaaattagctggtcatggtggtgtgtgccggtaatcccagctactcgggagactgaggcatgagaatcgcttgaacccgggaggtgaaagtcgcaattagccgagattgggccacttaactccagcttgggtgatggagtgagattctgtgtcaaaaaatacataaaaataaaaagatggaacatttccaactttgttttaaaaggcagaaaaataaggatatttaaactggacaaagatggccaaaaaaaggaaaattcatgaagggagatcctattcataataggaacataaatcacaagactgcaaattcctatgcataggaataaccacatagcaaacatttattgagtgctatgtgttgcaagcacatttgaagtgcttcaccagtatcgcctcatttaatcttcacctccaggatactcagtatcccagttctattgatgaaggaaccaagactcaaaaagatggaataacttctctaagctcatacagctaatcaacaatggagttgagatttaagccaatttcccccagtcctcacaatggatacagttaatcttgatttttttttttttttttgccaattttgtaggtaaaaatatcaaaaaaagatacctggttttaatttgcatctctttgttttgcatgatttcctgccacataaattttaatatttattcttgaatcacatttaacttcaattttgcatcttcagtatttatgaaatctttcattagttacattcctcaaatgaattcatcccactggattccagctactgttcatctgtctattctgatacttcattgagaataccaatatttttctaaatttacttttgataaaactgaacattttttcataggtgattttatttgtgtatatatacatatgtagtgtgcatgtgtatgtttgtatatgtgatttcttcatccatgattttttaatttattagtgagtaaaatgttttaaaagaaaaacttatccttaaactattaggttaccctgaagtataatttttataggaaaagtaggataaaaacttgattctttccccttatttatcagttttcaaaattgttccctatcactgtctaaaagtagtcagtaagtttttttagtatcattatgaattcatagttttacacatattttatgtgtttcaatgcactgcaattgatttttttttttttgaggcagagtcttgctctgttgcccaggctggagtgcagtggtgcaaactcagctcactgcaaactccgactcctgggttcaagcaattctcctgcctcggcctcccaagtagctgggattacaggcacctgccaccacgcctggctaatttttgtatttttggtagagatggggtttctccatgttagtcaggctagtatcaaactcctgacctcaggtgatccacccgcctcaggctccaaagtgctgggattacagacatgagccaccatgcccagcctaaaaataatattaataaattatcacactggttagtcaactcagctgtagattaaaatgtccagtcatctaatgcacttgacagttcgggacagaagcattaaagtggcttcacaggagatcctattcctcactccacgttggacattgttatgggttgaattgtgtccccccagaatatatgttgaagttctaaccatgatacctgtgaatatcaccttatttggaaacagggtctttgcatgcaccaccacatctggctaatcaagtgaagatgaggccaaactggatgaaggcgggcctgaaatccaacgactggtgaccttataaggagggagagcttcaaagacccaggcagtcatagagggaagaagggcaagtggcaaagaagacagagattgggtttctgttgccaccgaggctgccagaagaggcaaggaagaatcctcccctagagccttcagaggcagatgcctggccctgctgacggtttggttttgaacttttagcctccagaactgtgcaagaataaatttctgttgttttaagccatcgggtttgtggtaatttgttatggcagctctaggaaactaatccagatgttaaagtttattcttacatagaaattgaggtttctaataaaaggtgtgtggacgtggctacttcgatcacttactgagctctggcaccatgacttctggccttggctatattttccttttcctttctttttttcctcttccttcttttcttttctcttttttccaatctctctttttttttttgaaacagggtcccgctctgtcagccaagctggagtgcagtggcaccgtcatggctcactgcagcctcaaacttctgggctaaagtgatcctcctgcctcagcctactgagtaactagtactataggcatgcatcaccacatctggctaatttttaaatatttgtagagatagaggtcatgcaatgttgcctgggctggtcttgaactcctggcctcaagtgatcctcccaccttggcctcccaaggagctgggattacaggcccttcttagttctttgatgccaatccaattttaggttcttaaccttggtactttgggtccactgtggattccccattctctccttctttctcttcctatttttgatcttatcccttacagatctcccttcatgtccctgcccccaaactgtaatttgtgatatttgctgtcaccttttatccattcttgtgcactagataatcttagtttctttatgtagttcactaatttaacaagccagactgaactgagtgtaaacaggcagtgaatttcttctcctatcaccacgttcaaacagtatcggttttcccctcctctcccctcaactctatctcatgcagattctatagcttttcaagtcaatgtcagtattagaacagtctcattttcaggcgttaaaaaatttcagtgctcacttcagcagcacatatactaaaattggaacaatacagagaaattagcatggcccctgcgcgaggatgacatgcaaattcatgaagcattccataaaaagaaaaaaaaagaaaaaaaatttttttaatgtttagtccctgccaggcacggtggctcatgcctgtaatcccagcacttctgggaggccaaggcggtggatcacctgaggtcaggagtttgaggccatcctggccaacatggtgaaactctgtatctactaaaactacaaaaattagctgggtgtggtgatgcacgcctgtaatcccagttacttgagaggctgaggcaggaggatcacttgaacctgggaggcgaggttgcagtgagccgagatcgcgccactgcacttccagcctgggcaacggagtgtggctctgtctcaaaaaaaaaaaaaaagttcagtccccttgaaatcaaactttagtgccctccatttcagtttcccctcacccagctttggcctctccagaggttgcgcagaccaacagtggcaggggagaggaggatagcccttccagttcctctctgctttctctcctttccgagctctgctgccttggatgcagcactgctgaagacagaggtggtattggtcaatgggagttcagaccagtttttcttctacagggatctcccggagttcagaccagtctttcttctacagggatctccccactcctgcctgacctcttcagctttggtcccagtcatacagctctggggttctcctccccagtccaacagttttgcacaggatctttcaagaagattcaagcttggccaccttccatgtctcccatggaaaaactcacccatgcatgcagctgggtcgcttccctttttcctagacctggctgttccaaccaggccctcccattgagtctcaggcagtccggagggaagctgcagtctctgtacttctcatgctttgccaggttctccccaggagtcttctgaatcatctgaggacaaggacagggctggtgcccgagtttctttcttttttaaaaatgtgtttagaattggagtctcgctatgttgtcgaggctggtcttgaactcctggcctcaatcaagcctctcaggcaggtgtggttataggcatgaaccaccccacctgacatatttactgacatattttaccatattttatcgaattctagattcactattgtttcttgtattccatacttccccttggggtctacttttcttggtaaaatatgctttaataattttctttgcaagagtctgtgagagatcagcaaatattcatccgaggacagggtctcactctgttgcccaagctaactgcggtggtatgaccacagctcactgcagtctccacctcctgggctcaagggatcctcccacctcaacctcctaaggagctgggactacaggcatgtaccacaaagtccggctaattttttatttttcgtagagacaaggtttcactgtgttgcccagggtggtcttgaactcctgacctccagtgatctgcctgcctcagcctcccaaagtgctgggattacaggcatgagccactgagcccagcctaagacccatttttgcagacagtacttaattaaatttactgacatattttatcaaattctagatttactattgtttcttgaattccatacttccccttgggatctatttttcttggtaaaatatgctttaataatttttttgcaacggtctgtgagagataagctctctgagtcttatctcagaggaagatattatctgttttcttctgggatctgttgttgctgaagagaagtatggttgttggcctaattgtcattcttttgtaggaaacttttgtaggaagcttcttatctgtcaattcctgatgttttaaagtttaccatggtatttctagtagtggatttttgtttatttgtcctgctttgtaaagagagagactttctgagtgtctagtcaattcatgttgctataacagaattccataggccgggtggctcaaacgaccaaatttgtttctcacagttctggaggctgggaagtccaagatcaaggcactggcagataggtgtctggtgagggctgcttcctggttgccagaaaccaggaactgtcttctcaccgcaccctcacagggtagataaagagggagagagctctgtgaagcctctttcataaggacacgaatccctttcataaaggccccattctcatgacctaatcactccctagggccccacttccaaatatcatcaccttggggcttcaattaatgaattttgtggtagacataaacattcagtctgtagcactgaggatttgtgtttttttcagttctggaaattctcagaacacctactttctttttgtttggttggttttttgttttgttttgttttgtttttgagatggaatttcactcttgttgcccaggctggagtgcagtggtgcgatctcagctcattgcaacgtctgcctcccaggttcaagtgattctcctgcctcagcctcctgagtagctgggattacaggcacatgccaccacacctggctaattttttgtattttcagtagagacagggtttcaccatgttggccaggctggtctggaactcctgacctcaggtgatccgcctgcctcagcctcccaaagtgcagggattataggcatgagccaccatgcccggcctcctactttctttttaactgttattttcccatcattatctccattttccttatattaaactcctgttaaatgtacattgaaactggtaactctacactcccttactcttttacctttaaacagcattgagataaaatttacacaccataaagtttactcatttaaagagcacaggccaggcacagtgtttcatacctgttgtcccagcactttgggaagccaaggtaggaggatcacttgagcccaggagttggagactgcagtgagctactatcacaccactgcactccagtctgggcgacagagactgactctgtctcagtcaatcataatcagtagtttttagtatacttacaaagttgtgcagccatcatcataatctaattttaggacattttcatcaaaagaaaccttgtacccattagtagtcattctccgttctctctccctgctcccaaccctaggcaaccactattctactttctgtctctctagacatacctgttctgggcatttcatgtacaagtattatacaacatgtggacttcggggtcttgattccttcaattaacagaatgtttttaagacttagtcatgccatagcatgtatgagtcctgcattccttttataaaattgtcatataaatcatacaccgtaaggctcaccattttacaatatacagttcagtagttcttagcacagtcacaaagttgtgcaacaatcaccactaattcctgaatattttcataattctgaaaagaaatcccacacccactagcagtcactcattccccttaccccatcccctggcaaccactaatttacttccagtctctatggatttgcctagtctgaaaatttcttataaatggaatcatacattatgtagccttttgtgtctgccttcgttcacttcacttcacatattttctttttttttctttcttcctttttttgagacggagctttgctcttgttgcccgggccgaagtacaatggtgcaatctcagcttgctgcaacctctgcctcccgggttcaagcagttctcttgcctcagcctctgagtagctgggactacaggtgcccaccaccacacccagctaattttttgtatttttagtagagatgggtttcactatgttggtcaggctggtctcgaactcctgacctcaaatgatccacctgcctcagcttcccaaagtgctaggattacaggcatgagccaccgtgcccagccttcacttaacatattttcaaggctcatccatgttgtagcaggatccagtacttcattccttttcatagctaaataaatattgcctcgtatggacatatcatattttgtttatccatcagttgatagatatttgtgtttttccactttgtgaccattatgtataatgtttacaacaataaacaaacagcatttgtttacaagtttttgtgtggacatgtgttttcagttttctgggcatatataggactagaattgctgggtcatttggaaacttcatgtttaacattttgaggacctgtcaaactgttttccaaagtggccaacccattttacattctcacatgtagcatatgaggattctaatttcttcacatcctaacactaattgtctacttttattttacccatcctagtaggaataaaatagtatttcattgtggtagagattttatttccctaatgactgattatgttaatcatcttttcatgtgtatattggccatttgaaatatctagtcaaatcctttctccatttttaaattgggttttctctcctttttcttaagttgcaagagttctttatacatcctggatacaagtctcttacctaatatgtgacttccatatattttttcccactctgtgggttgtcttttcactttttttttttttttgagacagtcttgctctgtcaccccgtctggagtgcaatggcacaatctcggctcactgcaacctccgcctcccaggttcaagagattctcctgcctcagcctcctgagtagctgggattacaggcacgtgccactaggctctgcttatttttgtatattttttttgtagagacagggtttcaccatgttgatcatgctggtctggtgtcgtttgaagcataacattttttcttttttttttttttttgagacagtcttgccctgttgcccaggctggaatgcagtggtgcgatcttggcttactgcagcctcaacttctgggcaggaggatcacctgagcccaggtgttatgttgtccagcctgggcaacatagcaagaccctatctctaaaaagaaaacaaaacaggcatctgggattttgatagggattgcattgaatctgtacattaacttgaggaatgttgccatcctaacagcattgtcttatattttataaatatgggatatctttccacttacttagattttttgtttgtttgtttgtttgtttttgcccaggctggagcacagtggtgtgatcttggctcactgcagcctcaacttctgggctatgtgatcctcccacttcagcttcctgagtagctgggactacaggcgcacaccaccatgcctagctaattttttgtacttttagtagagaaggtgtttcaccctgttgcctaggctgatcttaaactcctgggctcaagtgatccacccacctcagcctcccaaagtgctggaattatagatgtgagccatcatgcccagacctatttagatattctttactttcaacaatcgttttgtggtttccagtgtataaatcttataattcttttattaaatttatttctaattattttattcttttgatactatattggaattattttcttatatcacttccagaatgttcactgctagtgtacagaaatacaattgatttttctttgttaatattgtatcctgcaactttgctgaactcatttattagttctaattgttttttttgtttgtttttagtggaattcttaggatttttaaataagcaagatcatgtcatttgcaaatagagatatagagatagttttacttccttttcaatttgaatgccttttatttatttttcttgccttactgccgaggctggagttccaatgtagtatgaatagaagtggtaaaagtagattttttttcttatttctgatcttagagagaaagccatcagtctttcagtgtttaatatgatcttagatataggtgtgttataggtgactttggtcaggtttaggaagcttccttatatgccaattttgctgaatattatttatcatgaaatgcattagattttgtcaaataattttttttttgagacgggcagtctcactctgttgcccgggctggagtgcagtggtgcaatttcagctcactgcaacctccagttcctgggctcaagcgattctcctgcctcagcctcctgagtagctgggattacaggcacatgccatcacgcctggctaatttttgtattttttagtagagatagggtttcaccatgttggccagactggtcttgaactcctgacctcaggtgatccacccacctcggcctcccaaagtgctgggataacaggtgtgagccactgtgcctgacaaaataatcttgctctgtctattatgatttttgtccattattttattggtatggctattatgtttattttttatgttaaactaaccttgcattcttacattaaattctacttagtcatggcatataatcctttttttacatgttgctagattccgtttgctagtattttaagatttttgcaactgtattcataaaagatgattatggtgtctttatttggttttggtatcagagtaatactggtctcagagaataagttgggaagtattcactccccttccattttttggaacagtttttgaagaactggtagtccttctttactaaatgtttggtagaattcaccggtgaaaccaacttgatctgagctgagctgagcttttctttttttttttttttttaaatacaccagcctgaacagatctgggctttcctttgtaggattttttaaaataactaaccaatctctttacttgttaaagttccatttagattttttcttctttagttaattttgttagtttatgactttccaggattttttccatttcatctaagttttctaattagttggcatacagttgttcacagtattccattatcgttctttttatttctgtaagatcagtagtaatttcccatctttcattcctgattttggtaatttgagtcttcatttttcttcatcaactagctaaggtttgtcaattttgttgatcttttcaaataactaacttttggtttcatgaattttctcttttgtatttttctatttctattttctattccattgtgtttggaaaacatactttgtattataataatgattttaaatctgttgaggctgttttacggcctattatatggtctattctggagaattttcatgtgtatttgagaagaatatgtattccactgatgcaggtggagtgctctatagatgtctgttaggtgtagttagtttatagtgtcctgatgtcctctattcatatgcttgttgatcttctatctagttgttctgtccattattgaaagcaaggtattgaactttattactgttatcattgaattgtcggtttttcccttcaattctgttagtttttgctgtatgtatttttgtggttctgttattgggtgtatatatatttataattgttgtatcttcctgagacgttagctcttttatcattataaaatgtccctattaatctctagtaacattttgtgtttaatagtattttatttgctattattagagccattccagctctctatggttgctgttgccagatatatatttttccatccttttactttctatctatttgcatttttgaatctaaagtatgtctcttgtagacagcatatagttggattatgtttgtaatcattctggcaatctctatcttttgattggattgtttaatctgcacacttttcacattgtcattgatccatttagatttacctttgtgtttttcttttcactttctatatatttcatgactactctgttctcttttcctcccttattaacttcctttgttttatgttgatattttctagtgtaccattttactttagttattttttcactgtatgtgtatattttttaatttttaatctttctttgagacagggtgtcactttgtcacacaggctggagtgcagtggtgcaatcatagctcgaactcctgggctcaacagtcctcctgcctcagcctcccaagtagctaggactacatgtgtgcaccctcatgccagctaattttttaaattttttgtagagatggggtttcactatgttgtccaggctggtcttgaactcctggtctcaagtgagcctccttccttgacctcccaaagtgctgggattacaggcatgagaaaatgtgcctggccctgaggtaatttcttcatggcctctataatgcttataataccttaatgtatcagaatcaactttagatgtatactaccttaattctagtaagatatagaaacttttctcttatatgtagctcctttctctccctactgttttgtggctactactgctgtacatattaaggtgtatatgtattacaaatccaataacatattgttataattactgctttatataatcctcccaaagtgctgggattacaggcgtgagccaccgaacctggccaatcctatgtcttttaaagaagctaagaaaagaaacaagagcagaaatatacgtatagagtttcttctttaaaaaatattaggcctggcctggtggctcacatttgttatcctagcactttgggaggccaaggaaggcaggctgcttgaactcaagagtttgagaccagcctgggcaacatactgagaccccgtctttacaaaaaatatataaattagcctggcatggtggtgtgtgccagtagtcccagctacttggggagctgaggcaggaggatcacttgagcccgggaggcaaaggttgcagtgagccaaaatcacgccactgaactccagcctgggcgacagagtgagactctgtctcaaaaaaaaaaaaatttccagagactttaaatgattgttttttaataactcactagttatatgattatattttgctggagagagggtctacgtccctcacgtagccattcgggaaccaaactgcagatgatgcgctgcgtctttttatctcttagtctttctgaacattctaaattagtccttcagtactattttctaatatccttgcaactttctacttgattctttttcgtgactacctgttcttattttatttctatttgttttagtttcctattttttgacattttaaatgtaaatgatttcttcattattatttgagcatcgcaacttttatttttcattttcttctgcaacattaaattcatatttcagtgggtgattttaatgactgcctttcttcatatgttttggaattttagtttgcaaatactttttttttttgagagtgtcttgctgtgttgcccaggccggagtgcaatggaatgattatagttcactgcagccttgacctcctgggctcaagcattcctccaacctctgcctcctgagtagctaggactacagacgtgtgccatcagacccagctaatttttttattttttatttttttttgagacagagtcttgctctgtcacccaggctgaagtgcagtggtgtatgttggctcacagcaacctccgcctcccgggttcaagagattctcctgcctcagcctcccagatagctgggattacaggtgcaccaccacgcccggctaatttttgtatttttagtacagacggggtttcaccatgttggccaggctggtcttgaactcctgacctcaagtgatctaccccccttggcctcccaaagtgctaggattacaggcgtgagccaccgtgcctggactagttttttaatttttttgtagagatggggcttactatgttgctcaggctggtcttaaactcctggcctcaagcaatcctcctacctctgcctcccaaagcactgggataacaggcatgagccaccatgcccagctgcaagttcattttaaagcaattgtttcattcttttttgttgttgatcttttttctgtcctccttagtttttacttatctccatctagaaacattaagatttccttcactgatcatctgggcaacctactaagagccagatgttatgatgacaattcagaatttctgcccaagtgatattgtgaatatggcagatttcagaaccagcagttccagctcattccagaccatagagatgtctatatgctcccatattccacatctagcctcagcagaggtcagctacagttggtgttttttataagcttccatcataaggaagaggagattcttctcaacttttaaagcactgactgtagctccaactccacatttaacctggagcaattttagtcccttttagcttctggactgatgttgcctctgcccattacttggacctacagccaagcaggcccactgcttgcactctgcccattgatttacactgccattgcgtttctggttggaggtatatttatcttggttttgaactcaactacatgtttttagacttttcttatctgtcattgcttttgcttggaacagaatcagtgatcaaagtgagatcattgccccagcttgcctagagtcccaatcccatcctgaatttgcagtcagccatttcaggctgtagtctttagcttctctgtaacattcacaatagctttttggatggaagtgatgggtggaatggatcagcaagacacagaaaccaggagtaaaaaaaaaatatgaaccagagtttgggtagggtaatggtgaggcctgtggcagggttcccagcagggcaagattctgtgcaggaaaacaaagttagaagttaaaactaggtggctggatgtggtggctcatgcctgtaatcccagcattttgggaggccaaggtgggcggatcacctcaggtcaggagtaaaaatacaaaattagctgggcatggtggcacatgcctgtaatcccagctactcaggaggctgaggcaggagaatcacttgaatccgggaggtggaggtgccggtgagctgagatcgtgccattgcactttagcctgggcaacaagagcgaaactcagtctcaaaaaaaaaagaagttaaaacgaagtaagatattcaaggtcagtgtctaaagcagggaacagctagtactaaggaataatctagtagcactgtgttctgacaaagatgttactaacggaggccctgtgggagccatgatctacccagccatactgcccaaagaaaaaatacttcaagagccaaggtttattaaagcaaaagtaggccgggctcagtggctcacacttgtaatctcagcacttcggaaggctgaggcaggagcatcacttgagcccaggagtttgagacatagtgagatcccacctctatgaaaaaaaattgttaattagctgggtatggtggcacacacctgtggttcctgctacttgggagacttggacaggaggattgcttgaactcaggaggttgaagctgcagtgagccgtgttcacaccactgtactgcagcctgggcaacagagtgagatcctgtctcaaaaaacaaaaaagaaaatggatttgggatttgagtctcctccaggagaatgtgtcctctcaaattttcttatattattgtctaactctttcaaggccctaaactatcccctgatggtaggatcctgcttcttagggtctttgaagaaggctttgaatttatgtatttttggattcttggttctccttcatcagaagcttatctatgattctatatctttctggaacaggaacttgagtcttaggccttaagagataagagattttttttaaacacaatacttggtgtttcatcgtattctcaatatgtaattcaataatcgctatcttcaggatttgggaactacagtgaaaataaataactattaaaggaatctggctaccaagtgtgtttaccagaaaataagaaagaacttctctgggttggacatggtggctcacacatctaatcccagcactttgggaggctgaaacaggcggatcacttgaggtcaggaattcgacaccagcctggccaatatggtgaaaccccatctctactaaaaatacaaaaattagccaggtgtggtggtgggcgcctgtaatcccagctgctctgggaggctgaggcaggagaatcgcttgaacccaagaggcggaggttacagtgagccgagatcacaccactgcactccagcctgggtgacagagcaagactccatctcaaaaaaagaaagaaagaaagaacctctctgagataattagttaggttaaaacttttttaaaaactagttactggtttcaattccaaaatactaaaagattgtgatcaaaattaagagtttgccttggcttttagttgaattttgaaaggcctcttagatgttgagttcctaggaatttggaaaagccttgtttgaggattgtctcttgactgagatctgaaatgtttaataagctatcaacctgtattattcccatttcctcaggatgctctttttgttttttggggcgtttttttttttttttttgagacaaggtctcactcagtcacccaggctagaggcagtggcagaatcacagctcactgcagcctcaacctcctgggctcaaacgatcttctcaccttagccccccaaccaagtaactgggactacaggcgcgcgccaccatacccagctaattttcatatttttgtgtagagatggggtttctccatgttgcccaggctggtctcaaactcctgagctcaagcgatccacccgcctcatcctcctaaagtgctgggattacaggcatgaggcaccatgtccagccctcaggctgcttttgaaatcccacacatgttagcatatgaggatgctaacaatgatttcacattcttctaagttctgagccctaggaccatcaggtgaaggcagccagtacctgggggatgatgtgtgtgacttacatggtcatcccaaaggacagtaaaatgatgcccagcattctctgccaaacagactaaaaaaggagagaagagcactgtcaaaaggcattgattccatgttatttagaaaggacaaatggaaatgatatgtgcatagagttctcccacagatatgatgaaggcaaaggagaagatgtatgaagctggtttggctaattagatcctataccgatgtctgaaaagactagtggaattaacatatacattgatggcatatttttacaatcttgtaaataggtagcatttatatcagtggtataataaaagaataattatcttttagacctgagaagagtttgcttagtaaggtaagggtgactcaacatcaagaaatgcattaattcacttcattaactattcaaaggaggaaattgatatgctcacctaaatagattttttttaatctaaaagaattcaacattttaaaaactttattaaggaaatttccaaccacacaaatatgtagagaggatagtataacaaaccctgtgtgttagtcaacttcaataattatcaaatcaacattggcttctttttaatattcatgttttattaacacttttagttcccctcaggctcttgcatttctccacagacatttatggtataaatgatcactcccaccaccaaacactccaacatttagcaaggaagtgaaagccattcccattaatttagaatttttttgtacatagagatgagagattgttagtaaacttttccaggaatagcatgtatttctgtacacttacttatcgaatctttaaatgatttaaaatgtcaaaattatagttcagtaaacatgaatacagtcttaataacagtctcttctaatttagtctgataaaagactttcatgctcaccagggcgcggtggcttacatgtggaatcccaacactttgggaggctgaggcaggaagatcacctgaggtcaggagttcgagaccagcctgaccaaaatggagaaaccccatctctactgaaaatacaaaattagccgggcgtggtggtgcatgcctgtaatcctagctactcgggaggctgaggcaggagaattgcttgaacctgggaggcagaggttgcggtaagctgagatcacaccattgcactccagcctgggcaacaagagtaaaactccgtctcaaaaaaaaaaaaagattttcatgttcgaaagaagacaatgtcttatatatctaaacttttcagcaaccatcaaaaaggtctaagtccatcaacaggtgaatggataaacaaatagtagtacatccatacagtggaatcctgctcaggaataacaaggaatgacttattgatatatgcaacaatctcaaaacaatcatgctacgcaaaggaaaccagaccacaataaaagatgttgtatggttccctttatataaaaatcaagaaatgcaaattaatggatatagagagaaagcagatcagtcagcacccaaggcagaggcataagagggaaggaacaaaagagaaattctcaagaagcagggttttgagaaaacttttgagggtgaggatgtgttcaccatcttgattgtgatgatggcttcccaggtatacatatgaaaacttatcaaattatataccttaaacatgtgcagtttattggatgtctgttagacctcaataaagctgtttttaaaaatgtatacaattccagagctctccagtctcaaaaatttttttaaaaatgtataagaacaggccaggcgcagtggctgatgcctgtaatcccagcactttgggaggctgaggcgggtggataacctaaggtcaggagttcaaaatcagcctgactcccatctctactaaaaatacaaaaattagctggacatggtggcggacgcctgtaattccagctactcgggaggctgaagcaagagaattgcttgaacccaaaaggtggaggttgcagtgagccaagatcgcaccattgcactccagcctgggtgacaagagcaaaactacatatcaaaaaaaatgtttaataacagactttgatagaagttacctttgacttctaatggctatatttggtcctaagaaaccttatgatgttctctaagagttagctcactcagtcattaaaattcttccagacatttacaaacagataggtgtgtataaacaaatcaaatatgttagcttatgacatagggctagagagttaaaattaaaattttttttaatgttaataagttagcacagcttattttataccatgtaaatagtgaaagaaagcctgcttaacttgaaatgttatcttccagaaacctccaacacatagcatacatgtcagcaaaacactgtctgctcattaaagaaagtcttgaggaagacaaaggtgcctagtactattgctacttctcaatatttactcaacttcctggccaatgaaataagaccagggtaagaacagataccttaaaaaggtacaggaagcaaagagactagtgtgatcatgtagagacagtatgatcatctaattaaagaatgaacagaaaaattactggaactgtaagagaattcaatatagtattcttagccttcctatatgctaaaatatctacttagaaaacacagttgggtactaggggaagatatcatttatgacagcagcaaaaatcagcctacaaaatattcaggagtaaacctatcaaaaatgtgcaagacctgtttgaagagacccttaccccacatgtaagagaggatttaagtgaatagatatttcatggactgattgggaagacccagtgtggccaagatgttggaacaggactcccctgagaccttgggacagcaccatgtcacagtccttcctacttctggaaattaattaggatatggttttgttttttgttttttgttttttgacagagtctcactgttgccgaggctggagtgcagtggcacgatctcagttcactgcaacctctgcctccggggttcaagtgattctcctgcctcagcctcccaagtagctgagattacaagtgtgtgccaccacactcagctaattttttttgtagttttggcagagacagggttttaccatgttggccgggctggtctcgaactcctgacctcaagtgatctgcctgcctcggcctcccaaggaatatgtttttttaatgaggcaagttgcatcaacatctcataggaaataatagttacctggagcatcttttgttcaaaacatcttggtttggagattgtgctggcttgtcctgaggcctcagtgcccgaattgagtgaatgaagtgaaaccatggttaggctatctcctccacaggtgaggtgaagacgtgatccctggagtcacttgagcctagagtttctgccttcgaagctgtctccctgtggtacccataaagcatgactgtggctgaccgtgtgtctctgcctccaccttttggctaagtgagccacaccaactcagtaaccccagcagagcactgtgggtggtctctgggtatgttgggagcattgttttcacagtggatgaaagaagaaaaaaacagtaaagccctttgatgggtctttcttgtggtcctgaaacttacatgcaagactaattaaggccaggtgcagtggctcacgcctgtaatcccagcactttgagaggccaaggtgggcagatcatgaggtcaggagtttgcgaccagcttggccaacatggtgaaaccccatctctactaaaaatacaaaaattagctgggcgtggtggtgggcacctgtaatcccagctactcaggaggctgaggcaggaaaattgtttgaaactgagaggcagaggttgcagtgagccaagataatgccattgcagtccagcctgggcaacaagagcaaaactccaaaacaacaacaacaacaacaacaacaacaacaacaacaacaaacaacctgtggctggcaaactggctgaataggaacagctccggtctgtagctcccaatgagatcaatgcagaaggtgggtgacttctgcatttccaactgaggtatctggctaatctcattgggactggttagacagttgggtgcagcccacggagggtgagcagaagcagtgtggggtgtcgcctcacccaggaagtgcaaggtgtcagggaactccctcccctagccaagggaagccatgagaaactgtgccataagggacagagcactccgacccagacagtactcttttcccacagtctttgcaacctacagaccaaaagatttcctctgatgcctacaccactagggccctggtggtgacaaaatctctcagcacttgcctgtctgtaaaggatttcatttcttctttgcttatgaagcatagtttggctggatataaaattctgggtggaaaattcttttctttaagaatgttgaatatcggaccccactctcttctggcttgtagggtttctgcagagagatgtgctgttagtctgatgggcttccctttgtgggtaacccgacctttctctctggctgcccttaacacaaaactgggtggccatttgggcagacaccgagctagctgcagaagtgtttttcataccccagtttcacctggaatgccagcgagacagaaccgttcacacccctgaaaagggggctgaagccagggagccatggtctagctcagtggatcccacccccacggaacccagcaagctaagatccaatggcttgaaatccttgctgccagcacagaagtctaaagttgacctgggatgcttaagcttgatagggggaggggcgtccaccattaatgaggcttgagtaggcggttttcccctcacacagtgtaaacaaagccaccaggaagttcgaactaggaggagcacactgcagcttagcaaagtcgctgtagccagactgtatctctagattccttctctctggatagggcatctctgaaagaaaggcagcagccccagtcaggggcttatagataaaactctcatctccctgggacaaagcacctgggggaaggggcagctatgggagcagctccagcagacttactgcctggcggctgtgaagagagcagcagatctcccagcacagtgcttgagctctgctaagggacagactgcctcctcaggtgggtccctgacccctgtgcctcctgactgggagacacctcccagcaggggtcgacagacacctcatacaggagcgctccaactggcctctggtgggtgcccctctgggatgaagcttccagaggaaggaacaggcagctgttctgcagcctttgctagtgataccctggcaaacagggtctggcatggacctccagcaaactccagcagacctgcagcagaggggcctgttagaaggaaagctaacaaacgaaaggaatagcatcaacatcaacaaaaaggacgtccacacagaaaccccatccaaagatcaccaacatcaaaaaccaaaggtagataaatccatgaagatgaggaaaaaccagtgcaaaaaggctgaaaattgcaaaaaccagaatgtctcttctactccaaaggatcacaactcgttgccagcaagggaacaaaactggacagagaatgagtttgacgcattgacagaaggaggcttcagaaggtaggtaataaactcctctgagctaaaggagcatgttctaacccaatgaaaggaagctaagaaccttgaaaaaagattagaggaattgctatctagaataaccattttagagaagaatataaatgacctgatgtagctgaaaaacacagcacaagaacttcctgaagcatacacaagtatcaatagccgaattgatcaagtggaagaaaggatatcagagattgaagatcaacttaatgaaataaagtgtgaagacaagattagagaaaaatgaatgaaaaggaatgaacaaagcctccaagaaatatgggactatgagaaagaccaaatctacatttgattggtgtacctgaaagtgacggggagaatggaaccaagttggaaaacactcttcaggatattatctgggagaacttccccaacctagcaagagaggccaacgttcaaactcaggaaatacagagaacaccacgaagatattcctcgtagagagcaacccaagactcataatcatcagattcaccaaggttgaaatgaaggaaaaaatgttaagggcagccagagagaaaggtcgggttacccacaaagggaagcccatcagactaacagcacatctctctgcagaaaccctacaagccagaagagagtggggtccaatattcaacattcttaaagaaaagaattttcaacccagaattttatatccagccaaactatgcttcataagcaaaggagaaatgaaatcctttacagacaagcaaatgctgagagattttgtcaccaccaggcctgccctacaagagctcctgaaggacgtactacacacggaaaggaaaaaccggcatcagccactacaaaaatgtaccaaattgtaaagaccatcaacactatgaagaaactgcatcaactaatgggcaaaataaccagctagcatcataatgacaggatcaaattcacacataacaatattaagcttaaatgtaaacaggctaaatgccccaattaaaagatgcagactggcagattggctaaaggtcaagacccaacagtgtgctgtatttaggagacccatctcacgtgcagagacacacatagactcaaaataaaggcatggaggaatatttacaagcaaatggaaagcaaaaagaagcaagcgttgcaatcctagtctctgataaaacagactttaaaccaacaatgatcaaaaaagacaaagaagggcatcattacataatggtaaagggatcaacacaacaagaagagataactatcctaaacatatatgcacccaataaaggagcatccatattcataaagcaagttcttagagacctacaaagagacgtagactcccacacaataatagttggagacttttacaccccactgtcaatattagacagattaacgagacagaaaattaacaaggatattcaggacttgaactcagctctggaccaagcagacctaatagacatctacagaactctcaaccccataccaacagaatatacagtcttctcagcaccacatcacatttattctaaaattgaccacataattgaaagtaaaacactcctcggcaaacgcaaaagaacagaaatcacaacaaacagtctctcaggccacagtgcaatcaaattagaactcaggaataagaaactcactcaaaaccgcacaactgcatggaaactgaacaacctgctcttgaatgactactgagtaaataatgaaattaaggcaaaaataaataagttttttgaaaccaatgagaacaaagacacaacctaccagtatctctgggacacagctaaagcagcgtttagagggaaatttatagcactaaatgcccaaaggagaaagcaggaaaaatctagaattgacaccctaacatcacaattaaagaactagagaagtgagagcaaacaaattcaaaagccagcagaagacaacagataactaagatcagagcagaactgaaggaggacaccaaaaaatccttcaaaaaatcaatgaatcaaggagctggtttttgaaaagatcaacaaaatagctagaccactagccagactaataaagaagaaaagacaggagaatcaaatagacacaataaaaaattataaagcagatatcaccactgatcccacagaaatacaaactaccatcagagaatattataaacacctctacacaaataaactagaaaatctagaagaaacagataaattcctggacacatacaccctcccaagactaaatcaggaagaagtcaaatccctgaatagaacaataacaagttctaaaattgaggcagtaattaatagcctaccaaccaaaaaaaggcccaggaccagacagattcacagcctaattctaccagaggtacaaagaggagctggtaccattccaaacaatagaaacaatagaaaaagagggactcctccctaactcattttgagtccagcattatcctgataccaaaacctgccagagacacaacaaaaaaagaaaatttcaggccaatatccctgatgaacatcaatgcgaacatcctcaataaaatactggcaaaccgaatccagcagcacatcaaaaagcttatccaccaccatcaagtcggcttcatccctgggatgcaaggctggttcaacatatgcaaatcaataaacataatccatcacataaacagaaccaatgacgaaaaccacatgattatctcaatagatgcagaaaaggccttcaataaaattcaacaccctttcatgctaaaaactctcaataaactaggtattgatggaatgtatctcaaaataacaagacctatttatgacacacccacaaccaatatcatgttgaatggacaaaagctggaagcattccctttgaaaactggcacaagacaagaatgccgtctcttaccactcctattcaacatagtattggaagttctggccagggcaatcaggcaagagaaagaaataaatggtatccaaataggaagagagagagtcaaattatctctgtttgcagatgacatgattgtatatttagaaaacctcatcatctcagcccaaaatctccttaagctgataagcaacttcagcaaagtctcaggatacaaaatcaatgtgcaaaaatcacaagcattcctatacaccaagaacagacaaaaagagagccaaatcatgagtgaactccgattcacaattgcttcaaagagaataaaatacctagaaatacaacttacaagggatgtgaaggacctcttcaaggagaactacaaaccactgctcaaggaaataagggaggacacaaacaaatggaaaaacattccatgctcatggataggaagaatcaatatcctgaaaatggccatactgcccaaagtaattgatagattcaatgccgtccccatcaagctaccactgactttcttcacaggaaaaaactactttaaatttcatatggaaccaaaaaagagtttgtatagccaagacaatcccaagcaaaaagaacaaagctggaggcatcacgctacctgactttaaactatactacaatgttgtagtaaccaaaacagcatggtactggtaccaaaacagatatatagaccaatggaacagaacagaggcctcagaaataacaccacacatctacaaccatctgatctttgacaaacctgacaaaaacaagccatggggaaaggattccctatttaataaatggtgttgggaaaactggctagccatatgcagaaaactgaaattgggttctcactcataggtgggaattgaacaatgaaaacacttggacacagggtggggaacatcacacaccagggcctgtcgtggagttggggggagaggggaaggatagcattaggagatatacctaatgtaaatgatgagttaacgggtgaagcataccaacatggcacatgtatacatatgtaacaaacctgcacgttgtgcacatgtaccctagaacttaaagtataataataaataaataaataaataaacataaaaataaaataaaaaaagaaaactgaaattggaccccttccttacaccttatacaaaagttaaatcaagatggattaaagacttagacataagacctaaaaccataaaaaccctagaagaaaacccaggcaataccattcaggacataggcatgagcaaagacttcatgactaaaacaccaaaagcaatggtaataaaagcaaaaattgacaaatgggatctaattaaactaaagaacttctgcacagcaaaagaaactatcatcagagtgaacaggcaacctacagaatgggagaaaatttttgcaacctactcatctgacaaagggctaatatccagaatctacaaggaagttaaacaaatttacaagaaaaaaacaaacaaccccatcaaaaagtgggcaaaggatacaaatagacacttctcaaaagaaaacatttatgcagccaaaagacacatgaaaaaaagctcatcatcactggtcgttagagaaatgcaaatcaaaaccacaatgagataccgtctcatgccagttagaatggcaatgattaaaaagttaggtaacaacagatgctggagaggatgtggagaaataggaatgcttttacactgttagtgggagtgtaaattagttcaatcattgtgggagacagtgtgatgattcctcaaggatctagaaccagaaataccatttggcccagcaatcccattactgggtatatacccaaaggattagaaatcattctactataaagacacatgtacacatatgtttattgaggcactgttcacagtagcaaagacttgaaccaacccaaatgcccatcaatgatagactggataaagaaaatgtggcacatatacaccatggaattctatgcagccattaaacaggatgagttcatgtcctttgcagggacatggatgaagccggaaaccgtcattctcagcaaactaacacaagaacagaaaaccaaaaactgaatgttctcgctcataagtgggaattaaacaatgaaaacacatggacacagggagaggaacatcacacactggggcctgtcagtggatgggggactaagggagggatagcattaggagaaatacttaatgtagatgacggattgatgggtgcagcaaaccactatggcacgtgtatacctatgtacctatgtaacaaaccttcaggttttgcacatgtgtcccagaacttaaagtataatttaaaaaataaaaataaataaaataattagaacaaagtccagcagtatagagaattaggtaataatcaataggaacagacaaatctaatgttgaaatagaataatagatccagaaattaattctaaagtcttatttatggttctttaatgtgtccttgatattagcttgcaattagctccatcaagtgatagtatccaacgtaaaatgggcttagcaatttcttgcttctcatgctgcttttatatctctcttctttcacattcttggagtccccaacaacagggcagaggctgaagggcacagatcttttgtgtcgtatggcttggcctccattgaagtaggtgagggtgaccatccctggtacggaaagacaggtccgggcaggccacagtctggctctcctgcctggcttcctgggaataattgagcaattgctctgtaccaggcggggttctgaatgcttccacgtcccaatttcaatcacttctgcaaggtgacgcagctaggaaagatgtgactcaggccactctggcatccaggactcacctcctcttctgacctctcgtcagcctgctgtattagctgggccgcccttcccatgttgacctcctcccatatctgagcgttggcctcacaggcagcgtcatgaagctgccaccatccctgtccccctttggttcaggccacagggatgcctggagctgggaacggccctgcgtagcactgactgcagagtcttcagtgcgtgtgtctctgtctcctttactgaactgtgagcgcctaaggaggggccttccatctgctagtttatccctggaatgtatctcaatgcttggcagaggataagcgttacatgttggatacattaattgatcctaagattctaagcactaaattttacgagaagtagcaaaaatgacctgaatgtagtcgcactgtatcttttcaatgatccaaacagctgactccctgggcttacgccttcataacgctggaaccccctcccgcccgctttgttcctctccctcttgcagcagatgggatcagagcggatggagatgcggaagcggcagatgcccgccgcccaggacacaccaggcgccgccccaggccagcccggagcggggagtcgcgggtccaacgcatgctgcttctgctggtgctgctgttgtagctgctcgtggtaaggtttggggctttttaatgaatgtgctcctgactgggaagtgtaatgtgctcctgactgggacgtggcacccctgaaagtggtggcagcttatggttaattcaataagtgttttttaagcaactactatatgcctgacacacagggacacccaagaaataacaacaggctgcatctgtctagctctcaaggggtttatgctcagatccctcaaatcaggccaacgtgtgttaaacaactaaagaacaacctcaggcggttcacgattgactatcaacatttgggcagaaatggttagaaagaattggactcgaggcactcctgtggtaatgaaggcttaggatctaagataggtcttaaaggttagggcgatgaagtagagggagcctggattttaccttctgctgcttccatttcataaattttgttttgtaataaagagaaatgtcaaaatatgtgttttaaagagagagaaatattaaaatatatgctaacttactgggtagaggaagacacacagacagtcattgctttaaaaaggaaagaaacgacttgaatgtaaaacatctgtgaccctttgagtagctgttaaaggtctggagaaaaggagataatttacacctaaaaatcatgggaactttaggttacatctttggaatcttggatatgaaaagtgcttagtgccagccaagtttgtgaaccactttcagcaatcaaatcatcctaaatttatgtaggcttggcagtaagttagaccaagacctcactgtctgctggaagagaagaaaaactgataatggactgatcacgaaccgtgaaatggaactaacagaactgatccctggggaggagagtggagttgaaaatgaaatgcccggggaagtttggtggctcctgcccaactcaggctagtattcatttccaagaagttccaatctggtggaagggacacagcaatagaacatccaccaaggggatcccgataccgatggtctcttcattcccacagcaagaggaaacgtggccatggggctgacaagagctaggcagtgtcaaggtgagacttcagcccctggtaggaatctggacagctctgcaggaagccagaggagaggcgctggtggtgggcagaggaaacacgtgggtgtccagggcctgccctaaaggaggaagacaccagtgatggccagactgcatttaggggcctatattctcactctgccagtaggtctcagtggggaaatgagaccatcctcctagagatgtgcaggatgtccaggtgcaggtgagactccagctgacgttcaaaccttccgctccctcctttctctgctgcctcacgcagggtgtgggaggcggctgacatgctgacctgaacaacgtattgtcccgggatagtgtaaggctagagggcgggtcaggtcccagagcaggctcctcctacaggtaacaagtaggacgaataaaataagtatctgtacctaagacactatcatcaccatcatagccaacacttctgtagtacttaggtgtgtgtagaagagacaatagagcaatatcttcaaagtgctggagaaaagtaactgaaaactccgtcaaaccataattcaagagtgtgggtaaaataagacattctcagacatacgaaggccaaccgagtttactgcctgcaaacctaaaagaaccgaagaaagggcctacttcagaggaaaaaaagggaacccagaggaaagactcaggaaacaagtaacaatcatagatacaacggggtcaaatattgatataaaatgtggcaatgaattttgtgttaaaaagtgtgaaaccaaagctgtaaacaatctcatgtcaatgacatacaatcaaataattcagactttcttagaaaaaattattaaaagaaaattttctttcaaaagtaatgttattcataattagtccaaaaatacaccctatagttttaacatcagtgaaagacaataaatctagaaaaccttaccaacacgtgataaaagtgacatcagcaaaggagaaaatgaactattcagtaaatagcaggatacttggtatttgggtaccaactcatccccactgataggactttctcagttttagcactgaaaggtcccatagcccagaaaacctgaaaaccctaggcaaaccaggaaaattggtcatcctgcttggtatccaaatatataaaaatgtatttatattcctacatagcaccatatacaaaaatcaattcccaccttaaaaaaaagatcagctgggtgcggtggctcacgcctgtaatcccagcactttgggaggccgaggccggcagatcacatgaggtcgggagttcgagaccagccctaccaacatggagaaaactcgtttctactaaaaatacaaaattagtcaggcatgggggcacatgcccataatcccagctactcaggaggctgaggcaggagaatcgcttgaacctgggaggcagaggtttcggtgagccgagattgcaccattgcacttcagcctgggcaacaagagcaaaactccatctcaaaaaaataaataaataaaaaataaaacacaaaaattagccaggcatggtggcgcacacctgtagtcccagctactcaggaggctgaggtgggaggatcgcttgagcccagggaggttgaggctgcagtgaatgatgattgtgccattgcactccagtgtgtgtaacagagtgagactctgtctgaaaaacaaaaacaaaaaaaaaagaaaagaaaaacctataccctggaaaaacttctcacacccctgcaaaaaaaggagacatgtatgagaagattcactacagcattcatctgagtgagaaaaatttaaaatggttctaaagggtatagacaggagaatggatgaatatattgtggtatagttatacaatccactaccatacagcacttaaattcatatactagaaaaacaaaactaaacaaataaataagttaggcgtggtggcttatgcctgtaatcccagcactttgggaggccaaggcagaaggattgtttgagcccaggagttcgagaccagctggggcaacacagcgagaccatgtctccactaaaaaaaaaaaaaaaaaaagttagcccggcatggtggcatgtgcctgtagtcccagctactctagaagctgaggtggaaggatcacttgaacccaggagttcaaggctgcagtgagctatgatcatgctactgcactccagcctgggcaacagagtgagaccttgtctcagaaataaataaattcatatgctagagggaaaaaaaattataaagcaatacatgttacataattacatttatactatgtttaaaaatatgtttatgaatataatatagtagcataattatgaattggaatggtaaacagtaagttaaaaatggtggctctctctagggtaaagagaggaagaaatgagatggggaaaagtacacagcaaacttcaactgttttaatagtgaatttccttgttttttttcaccacacttttgagatttatccatattaatatacatagtcaagtcaattttcaagaaaagtaaatggcaatttcttttctaagtacttgtgaatctttctcaacattttgctgtaaggccttctggtatttagtgttataagggaaggcatgctgattcttgttcagttgaatataaagtttttttcctttctagtaagttttctctttatcactcaaaattttaccaaaatatatctggccatgggtcttcttttactgaaacttcctaaaacacagcgagcaactatcttggctactatagacatcttctaggtctgctgtaacaataacagtggaccgaggtaaagaaaacttcacaaaaaaaaattcttctctttttcaaaaccacattgtctctttaaaacattcttacttgaaatgagggaaaaagtatatcaaagctgaaataagtttgcattatttagtttgcagtacagcttctggttctctgaggaactcctgtcaaattcatctcttttttcctctgctttttcatacccactgagcagtaatgtgttttgcttacaaaagaagcctcggaagtcatgcagagagcgtaccactcagatgcctctcaagttttttttggttggatttttttttaaagaagccattatttactgaaactatttagccctgacatcatgaaagaaagaagtcaaaagggttcctgcatttctaatgattttgcctttaaagaaaaatagagctacacacacacacacacacacacacacactgaaaatttataaaacagttgtgctaaaaacaggctgaaaaacttttataaaatagtgttaagaaaagatataataaagaatatagaaaatacagtagcaacaagataaagaaaacccaaattgtcagtgataaaatccattttcatgttgatgggatgctgaaagcattcctgcaaaaatcatgaataaggcaaaatgtccacaatctctactactatttaacaatgtatttggccaggcgcgatggctcacgcctgtaatcccaacactttgggaggccgaggcgggcagatcacaaggtcagcaattcaagaccagcaggaccaacatagtgaaaccccgtctctactaaaaatacaaaaattagctgggtgtggtggtgcgcgcctgtagtcccagctactcaggaggctgagggaggagaatcacttaaacccgggaggcggaggttgtagggagctgagatcacgccattgcactccagcctgggagacagagcaagaccccgtctcaaaaaaaaaaaaaaagtattttaggtgttagctaattagacaagaaaattagaggcctgagaattggaaataggtaaaattcttcctatttgcagatgaaacccgaagagaattatagctataactgatacaaatacagaagaattcagaaataagaaggatataaaattatcattaaaataatactctgtaggcttcaggtcttaaaatgaagaacacttccatttcaataataaaatgcaaataaatcaatttagaaatggtcaaaacatctgaacacacatctctccaaagatgtacaaatagctagtaaatgcatgaaaagatgttccacatcagtagtcattagcaagatgcaaatcaaaaccacaatgaaataccacttctcacccacttatgaagctagaataaaaaagacaacagtaactgttggcaaggacatggagaaattggatccctcaaatattaccatgtgaaatggtgcaattgccttgtaaaacagtttgggagttcctcaaaatgttaaaactcaagttaccatatgactcagcagttctactccgaggtttctacttgagagaaacacaaatatatgttcgcacgtacttgcacaggaatgtgcatagcagcatgattcatgcagccaaaatgtggaaacaacccgaatgtctatctgctgatgaatggacaaacgaaatgtgatgtgtctatccaaacaatgagatattattcaactggaaaaagaaatgaagtgccgatacatgctacggcatgggctaagtgcaaaaacattacgccaagtgaaaggagacagccagcaaagatcacatacggtatgctccacaacaggcaaatctatagagacaggaagcggattcgtgcttgcctagggccggtagagtggggagatacaggtgataagcagtgactgcttactggtggggtttcttttgggggtgatgacaatgttctggaattagatagtagggatggttgcacaactttgtgagtatactaaaaaccactgaattgtacactttaaacagataaacttgacggcatatgaatgatagctcaataaagtgattaagaaagtggccgggcacggtggctcatgcctgtaatcccagcactttgggaggtccaggtgggtggatcacttgaggttaggagtttgaaaccagcctggccaacatggtgaaaccaaatacaaaaagtagccgggcgtgttggcacatgcctgtagtcccagctactcaggagactgaggcacaagaatcgcttggttgcagtgagctgagattgcgccacagcactgcagcctgggcagcagagcaagacttggtctccaaaaaaaaaaaaatagcattcatattacaacaataaccagttacaagatgagataaaagtacaaattccatttacgataacaacaaaaatacttggaataagtttacagacaaatgtacagaatgtgtataagaaaacaaactctttagagaaatacaatagattttgattatgcactttatttttctctactacttttgtatatttgcctataaatatatgaagcctccattttgactggaaacaaagcctagaggatgtatactttttaagatgcagaaaatgaaatgaaaccccaatacattcctgacagtcttacttttttactattttcatttttttaatttttgtattaaatagagacagggtctcgctatgatgcccaggctggtcttaaactcctggcctcaagtgatcctcctgccttggcctcccaaagtgctggggttacaggcatgagccaccgcgccgaacccttttttactattttctaatgaatgtttttatttaaaaaatcattattctaagtataattgaacacaataatttctaactctttctcaatagtagaaaccacaacgtttatttatatttctagtaccttattgtcacacttttggtttgcttgggaaaactaactggggtcatttttttttccaagtagaggaagaaattctattaatacttggggatctgaagttctctttaaagtatttgtaaaaaatcttttcttggcagggactgagctgtcaacatgtgaatgtcttttttttgcagtctcactgttagaaaccaggaagatcagaggcccacaatagcttcccacgaactcagagcagatcttccaacctgggaagaaaggtgaaatcacacgttttttttacctcactaaactaacagaaatactaacctctttcttttctttgccttgtatgtttcaacagaacacatactttctctaactgtaatttagtaatatccaatcattatgtggcctcgcattcctcccctgcagaattccatttaattcatcgtgtgacagggagagaaatcagttccattattagtctaatccctttgctaattgcaaatacaaatagattcttcctaacaaaacatattatgttattttatttttatataatatacttttaaaaataaaagtatatcatataattttatataagatatagcatatatatttatatatactatatataaaatacagcatatatacttatatatgctatatatatgatatagtatatatatttatacactctatataagatatagcatatttatacacgctatataagatatagcatatttatttatacatgctatataagatatagcatatttatttatacatgctatataagatatagcatatatatttatacatgctatataagatatagtatatatattatatatgctatatataagatagtatatatattatatatgctatatataagatatagtatatttatatatgctatatataagatatagtacatttatatatgctatatatgatatagtatatacatttatatatgctatatataagatatagtatatacatttatatatgctatataggatatagtatatacatttatatatgctatataggatatagtatatacatttatatatgctatataggatatagtatatacatttatatatgctatatataggatatagtacatacatttatatatgctatatataggatatagtacatacatttatatatgctatatataggatatagtacatacatttatatatgctatatataggatatagtacatacatttatatatgctatatataggatatagtacatacatttatatatgctatatataggatatagtatatacatttatatatgctatatataggatatagtatatacatttatatatgctatatataggatatagtatatacatttatatatgctatatataagatgtagtatatatatgctatatatatgatatagtatatatatttacatatgctatatatataagatatagtatatatatttacatatgctatatataagatagtatatatatttatatatgctatatatatgatagtatatatactatatataagtatatatgctatatgtaggatatagtatatatatttatatatgctatatataagatgtagtatatatatgctatatataagatgtagtatatatatgctatatatatgatatagtatatatatttatatatgctatatatatgatatagtatatatatttacatatgctatatataagatagtatatatatttatatatgctatatatatgatagtatatatactatatgtaagttatagtatatatatttatatatacgatatatgatacagtatatatacatatgctatatataagacagtatatatttatatatgctatatataagacacagtatatatttatatatgctatatataagatacagtatatatttacatatgctatatataagatacagtatatatttacatatgctatatatgatacagtatatatttacatatgctatatatgatacagtatatatttacatatgctatatatgatacagtatatatttacatatgctatatatgatacagtacatatttacatatgctatatatgatacagtacatatttacatatgctatatatgatacagtacatatttacatatgctatatataagatacagtacatatttacatatgctatataagatacagtacatatttacatatgctatataagatacagtacatatttacatatgctatataagatacagtacatatttacatatgctatataagatacagtacatatttacatatgctatataagatacagtacatatttacatatgctatataagatacagtacatatttacatatgctatataagatacagtacatatttacatatgctatataagatacagtacatatttacatatgctatataagatacagtacatatttacatatgctatataagatacagtacatatttacatatgctatataagatacagtatatatttatatatgctatataagatacagtatatatttatatatgctatataagatacagtatatatttatatatgctatataagatacagtatatatttatatatgctatataagatacagtatatatttatatatgctatataagatacagtatatatttatatatgctatataagatacagtatatatttatatatgctatataagatacagtatatatttatatatactatatataagatacagtatatatttatatatactatatataagatacagtatatatttatatatactatatataagatacagtatatatatttattggtcatttacaaaaacttggatttaaacatttgaaaatatatatccttctcaagcaaacatgaaacagttatattttaaaaataaaagtatattatataatatacggtgggtgggcacggtggctcacacctgtaatcccagcactttggaaggtcaaagcatgcggatcacctgaggtcaggagtttgagaccagcctggctgacatggtgaaaccccttttctattaaaatacaaaaattagcggggcgtggtggcaaacgcctgtaatcccagctgtttggaaggttgaggcagggagaattgcttgaacactggaggcagaggttgcagtgagccaagattgcaccactgcaccccagcctaggagacagagcaagactctgcctcaatcaatcaatcaatcaataaagggagagggagaaagaaaaagctatagatgcttgccaaaaatttaatggtatataagtaaagaaagtggtctaacctctaagagagtaaacactgttaacacatttcttttttttttttgagatggagtctagctctgtcacccaggctggagtacagtggtgcaatcttgactcactgcaacctctgcctcctgggttcaagcgattctcatgccttagcctcccaagtaactgggattacaggcgcccaccaccatgcccagctaatttttgtatttttagtagagatggggtttccccatattggccaggctggtctcgaactcctgacctcaggtgattcgcccacctcgttctcccaaagtgctaggattacaagcgtgagccactacgcccagcgtgttaacacatttctttaagaaatgacctggaagatttgaaaagaaataaaatagaagttttaaaaatcaaatattattgttcaaattttaaaaaaattgatgattgaaatagaagattagatacaactaaataaataattagtgaacctgaaggtatccaaaaagacccacgtaacaaggagattgaaatacagtttgagtttcccttatccaaaatgcttggaactagaaatgtctcagatttcagattttttcagatttcggaatatttgcattatacttaccagttgaacatcccaagtccaaaacttcaaattattccaatgagcatttcctttgagtgtcatgtcaatgctcaaaaagtttcagattttggagcaatatggattttagatttttgaattttggatgttcaacctatataaaaataagttaaaataaatggaggatagaatgataagaattgacattaatgttttgtttttttttttttagacagggtctcattctgtcacccaggctggcatgcggtggcacgatcttggctcactgcaacctctgcctcctgtgttcaagtgattctcctgcctcagcctcccgagtacctgggactacaggcatgggccaccacacttggctaatttttgtatttttagtagagacggggtttcaccatgttgcccaggttggtctcaaactcctgagctcaagtgatctgtccacctcagcctcccaaagtgctgggattacaggccagagtctgtttttatccactaatctatacttcttccccatactagcagtaaacaaaatagactttaaaaaattttaaagcactttagagacagagcaagtcactactagaacgttaaatgatttagcttactaggaaagtgtaacaacttgtatgtacctaataaaataatctcaaacatcaaaagcaaaaattgctagagcaagacatttacaaatctgctaacgatagagggagattgccacattcctttcttagttactgatatttctaacagatagaaattttagacaaattatagaaatttgggccaggcacagtggctcctgcctgtagtcccagcactttgggagaccaaggatgggggaaagcttgagtccaggagtttgagaccagcctgagcaacatgacaaaatctcatctctacaaaaaaatacaaaaaaatttagctggctgtgatggtgcgtgcctgcagtcccagctgctctagaggctgaggtgggagagtcaattgagcccaggaggttgaggctgcagtgagccatgatcacaccactacactccagcctgggcaacacagtgataccctgtatcagaaaaaaagaaaaagaaaaaaagaaacagggagaaattaattaataagctatatttattggtcatttacaaaaacttggatttaaacatttgaaaatatatatccttctcaagcaaacatgaacagttatgataactgaccaagcattaccttataaagtatctcaataaatttcaaggaacataattaatcaaactgtactgacaccaatataattcaaatagaagttagaaattaaaaaataaagccgagcactgcggcacacgcctgtgatcccagcactttgggaggccgaggcaggcggatcacctgaggtagggagtttgaggccagcctggccaacatggtgaaactccgtctctactaaaaatacaaaaatcagctgggggtggtggcacccacctgtaatcccagctagtcgggaggctgaggcaggagaatcgcttgaacccgggaggcagaggttgcagtgagccgagatcgcgccactgcactccagcctgggcaacagagtaagactaaaaaaacagaaattaaaaagtgaactaaaaatcctcatatgtttgacatttattttattttattttacatcattattatttttttgagacagagtcttactctgtcacccaggctggagtgcagtggtgcaatctcggctcactgcaacatctgcctcccgggttcaagtgattctcctggctcagcctcccgagtagctgggattacaggcacatgccaccatgcccagctaatttttttttttttttttttttgagacagagtattgcagaggttgtggtgagccgagatcacaccactgcactccagcctgggcaacagagcaatactctgtctcaaaaaagaaaaaagaaacttaatgttgggtggaaaaagcaagttgcagaagacaacatatagtcaaccattttgataaacttaaaaaaaaaaactggctgggcacagtggctcacacctataatcccagcacttcgggaggccaaggtgggtggatcacctgaggtcaggagttccagacagcctggccaacatggtgaaacgccatctctactaaaaatacaaaaaattacccgggtgtggtggtaagcacctgtaatcccaactacttgggaggctgaggcaggagaatcacttgaacccggaaggcggaggttgcagtgagccgagatcgtgccattgtactccagcctgggcaacaaagagagactctgtctcaagaaaataaaataaagaaataaaaactaaagactacatttttcaggattacatacatacatttgaaactatggaaacaagataaaagagatattaaggatcattattaagctatgttttctgatctcaatataattatgacagaagtaagaattaactcaaaggggtaagcccaaaatcaagtatagcagttccctagaggacaaagccaagagacagtagcaagtagaagtagcacgaaaataaatgcaacattatcagtgctgttctggttcttaaggaaaatggcgcattcataagtgttcatttacactagagactcggaaaggtggatgggagggtgggagataggtaagggatgacaaattacctaatgagtacaatgtacactatcccattgatggctacactaaaaacacaggcttcaccactgtgcaatatatccatgtaacaaaagtgcacttgcaccccctaattatagtttttaaatgtttataagttttttataaagtgagccagacgcagtggctcacacttgtaatcccagcactctgggaggccaaggtgggcagatcgcttgagcccaagagtttgagagcagcctaggcaacatagtaagacctgactctacaaagaatacaaaaagttagctgggcgtggtggcacgtgcctgcagggtctgctacttgggaggccaaggagagagaatcatatgagcctagtaagtcgaggcttcagtaagctgtgatcacaccactgcactctagcctcagcaacaaagtgagactctgtctcaaaaaaaaaaaagtgttcattttgttgtcacctttggacagtacagcggtggcatttataacttgcacttatactacatatattctctttctcaaatattatataattttaaaatatattaaacagacacttgctctattgttccagaggtttaatgttgtcaaatctgacttagttctgtcgtagtacagaactcatcacagatgattaggaagttttgggtcagatggttgcaggatttttctttacatttacagtttttaaaatatttcaagatgtgcccatttgtaaacaagcatgttcttagcatttattctagcaacttggtttgcaagccttttggtatgcaatccagcaaaaaatttgaaagtatcatattcatgtgtttttcccaaaggtttgaggaaatgcgaacagttctttcccttcctaaaagggcctaaatgcatatatttttcattcttggaggaggaaaagatatgttcctaatgatgaattccaattaactaccactaacagttcccttttgccccctctcttttggtctccacgaagccctgctcctactctggaagaagtcaacgcctgggctcagtcatttgacaaattaatggtcactccagcaggaaggaatgcattccgtgaattcctccgaacagaattcagtgaggaaaatatgctcttctggatggcctgtgaggaactgaaaaaggaagctaataaaaacattattgaagagaaagcaaggataatctatgaagactacatttctatactttctcctaaggaggtatgtgaccacgagatgccttttcccaaggctgttggtaaaattaacttggtgcaaaagtaattgccataggccgggcacagtggctcacgtctgtaatcccagcactttgggaggctgaggcgggcggatcacctgaggtgaggagttggagaccagcctgaccaacatggtgaaaccccgtctctactaaaaatacaaaaattagcctggtgtggtcatgggcgcctgtaatcccagctacttgggaggctgaggcaggagaatcgcttgaacctaggaggcagaggatgcagtgagccgagattgtgccattgcactccagcctgggtgacaacagcaaaactccatctcaaaaaactaaacaaaagtaattgccttttttttttttttttgagatggagtctcactctgtcgcccaggctggagtgcaatggtgcaatcttggctcactgcaacttctgcctcccgggttcaagcaattctcctgcctcagcctccagagtagctgggattataggtgcgcaccaccaggcctggctaatttttgtatttttagtagagacagggtttcaccatgttggccaggatggtcttgatctcttgacctcgtgatccacctgccttagcctcccaaagtgctgggattacaggcgtgagccaccgtgcccggcctcgccattacttttaactttttccagaaaaatgcacaaaatttttcaccaatttcagaggacatttggagccgctctgcaggtccacagtcaaagggatctgaataccgtgaatgcgggtgcagctgttttctacattttgcagttgatgttctgggtcaagctgaacatgaccaaacagctgcacccacattcacggttttcagatcactttgactgtggacttgcagagggctccaagtgtcctctgaaatctgtgaaaaattttgtgcatttttctggaaaaagtatcccctggagtctccatttgacactgaacactgtttacaaatattataccctaagacgttcctttaaataaaattatcttgttattctgagaaaaatcttgtatttaggtatcttgatgttatagagcagcagcatcacagatgtgatactgatgctgaaaaggttttccccaggctggctttttcattcaagaaattatcagatgaatgagattgggcaagtttccacctgtcagtgtttcagtttcttcaaatctaaaatgtaggaggccagccctggcacagtggccaacttctgtaatcgcagcattttggcaggccgaggcaggtggatcacctgaggtcaggagttcgagaccagcctggccaacatggtgaaaccccatctctactaaaaatacaaaaaattagccaggtgtggtagcattcatctgtaatcccagctactcaggagactgaggcaggagaatcacttcaacccgggaggcggaggttgcagtgagtagagattgcgtcattgcactccagcctgggcaacaagagcaaaactccatttcaaaaaaataataataataaaataaaatttaggaggtcagattgttctcaaattgggtgccttgtagctctaattataaaactattagttatttcctactatgtgccgacaggaatgtcaagttgaagaagcagggcctctcctgtcatggagctcctggagatgtgggcggacagaccaggacccctggccacactctcagcactcactggggctcgggggtgagccatccacaaaggggtgggcgagaatgagaaaaatactcaaggaggctacagatggaccaaggatagtgaaaaggaaatttccacaaacacagcaggatggggacatcccaggagacaggaccaggcgagcccaggggaagagcatgaagttgtgtgatcactgcaagtatacacagattgtgccagaaagggagggtgcttaccaaactattagggctgggggcaggcagcaggaggagacttagagaaggggtagtcggagagcatggagaggtttgggcatcatggcgaagtgtctggatttttatcttgggaagcccttggattttagcctgtttatatcatcaaattttgatttttgaaagaccagtagggctgcagagtgaatttggagaagaccaggggcagaagacgttagaaaactaattcaggagtccaaagggacatggtgagggcctagctaggccagctgaagacgctagagaggaagagtcggatttgaggcaaaccccaccgtctcaaatgactcccatatgtctggtgtaggcagaccaggtggtggggtcgttggcttacttaattttgcgtcgttacgttttgctttcttaagtttgcgttgttaaattggtaatattcagttgacatgtttgaatactgagtccaaaaagttattttcattttgaattaataaggagcaagataatttttgtcctttaatttatggcttccacatatttttattttgtcatgattttttttaaggcaaggtttttcatcaatcttttaaagtattatacaaccaaaaacaggccgggcacagtggctcacgcctgtaatcccagcactatgggaggccgaagcaggcagatcaccttgtctaggaagagccaaacatcagagcaatcaacatctcctatgggcttagtgaaatccaagcactttgtcattaaatcacaaaaaacctaagacattaccatcatcatcatccccacttcaggggaagagctcactaggacacagagtttaccttgcctgaggccccacagctatacagtgacagggatggattttgttttgttttgtttttgagatggagtctcgctctgttgcccaggctggagtgcagtggcatggtctcggctcactgcaacctctgcttcccaggttcaagcgattctcctgcctcggcctcccgagtagctgggattacaggcacctgccaccatgcccagctagtattttttatttttagtagagatggggttttgccatgttggccaggctggtttcgaactccacagcgctgggattacaggcgtgagccaccatacccaggcagggctggaatttaaacacaggcattgtctgccctcaggccctgtgattggaaccttccagggttttgagtcaacttccacttcacccctgtgcccaaccctccgggcaggccagcactcatccccagagccctgccactgtgggccagcaggggaagcctgggcctccaggtgtcagcccccacgttacaaggaaatgagcaaggggcagtctgtgctgcctgttttcttcaaagcagcagtgtgagccctgccagcatcacttagaacttgtgggaaataacaagcatcaggggcccctacacctactgagtctggggtggggcccaggaaccgctctcacaagccctctggagcctgctgatgccactgacatttgagaactgcgttgattatgcttttggtttctctttggcagtttggattttttggatgatcttgtttggtttgggatatttaaaaaacaacaaggccgggcacagtggctcatgcctgtaatcccagcagctagagaggccgaggcgggcggataacctgaggtcaggagttcgaaaccaaccaacacggagaaaccccgtctctactaaaaaagttagccgggtgtggtggtgggtgcctgtaatcccagctactcgggaggctgaggtaggagaattgcttgaacccaggaggcggaggttgcactgagctgagatcgcgccactgcactccagcctgggtgacagagtaagactctgtctcaaaacaaaacaaacaacaaaaaaaccaaaaacaaaaaacaaaaacaacaacaaaaatccccacaagctctaggagtttgggatagagatacaactgaagtctctaatacagctcctactcgtttctgtcgacaggtgagcttagactcccgggtgagagaagtgatcaacagaaacatggtggagccatcccaacacatattcgatgatgctcaacttcagatttacaccctgatgcacagagactcatatcctcgattcatgaactctgctgtctataaggacttgcttcagtccttatcggagaaatctattgaagcataggatttttcaaatatatttattattaataaaataataaaagaattcatgggctacaactagcacagggaatttagaggttgtagcatcttctgctggagtaatactcaggctattctaataacagatgattccttcaacagactgctatatattcaccatgtaaactgcagccacctttagtgatacttttgaaaaaaaaaaataaagggatatggctgttgtagaaagatagcgtatttgcatttacaataacagtagcatgttgtcagtggccaaggctacacagaaggctccctgctgcccggagcaggtacatccaccagagcaaagggaaccacttttattttgcatgagtttggtaactgattactctcccctcaaagaaaagacattcaggtgtttctcaacgacatcttctgtccagcaagctcggtttgaatacgtcacttaccagtgccattgcaggacccaaattcacagttcataaaagatgtgaccactacatgtaaaaatagcattctacttgatcttacagtatgtatgtatgtatgtatggagacatatgtgtgcgtgtggatgtctacatggttaatggaaagcactgtgctctgaagtggatcagtctcaagtgtctggtaacagcagcagtgcttagaaaattcttttgttgaaaagagttactgttattatcagaatttgccaacctaaagaatgaatttttaaattcataacttggtcatgttcacaacaaaactgtcaaataagcatatttccatttttattactgaaagaaatatgggcattttcattctttaaagaaataaagcacaagaattttatctcaatctttatttttccatatgtacgtatttgggaaatagaagattaagaaagtagggatacgtgcagcctatcttttagctcccagactaggattctgtccttagatcccactatttttatcatagataaaaagaataacttctcacaggtaaaactaccagttggtagacctagaccatcctgaagaaatccatctctacatagaataggaaacacactcaaaatctgggacgctctgagtagtgggaaagacgctactttgcaggaggcggcaccgtgctcctgccctcgaggggaatggttctcctctgggtccttctccctccctggcccctccatagcctgcctgtatcttcatgactcaactcaagccccaaacccaagcccctctccttcattctcaggaaaccattttacctcctactctactatgcaaattgtgtccgtaagtcccctcaacttcccgtgcaacctataaatatatatagatcagcgtctattctcatctccctcagtccagtcccagagaacaatgtgctctcctcctttttgaggtgtcaatcccttacatgtgcttccaagttttccaatctcatttcttactaaaaaaaaaaaaaaggatgtgattgcaaataagacataaaccctgccctctagtagtttacattcagtaaaggcagacagacatgtcagtggcaactctgatatagtaagaaccacagcaggggaagaacagcgctgtgggagtcacgaagggttatggaaagattctggtggagatggcaccaaagtcaaaatccagagaacaagaagaatggatgtgttggaggcagagagggcactggatgagatggtattcataactgagtgaccccaaaggaatcgacatgctgagaacgagggaagacacacatgaaaggacatgttggaatcagttggatggagggatctgggtgggtgagtctaggctggcgtactgattttggggtttttcagcacataggggaataagattgcctggagaattatgcatgaaaagatagctgagggtaaatcattgcaaggatagacagaactgacagccccaaaggagatttaggattcaccttgtcaataaaagtaagaagagttggggaatatggaaatatggcagcaaatgcatgggagtgtctcgaggggcggtggtgaacagtggtaaatgaaagactcttacttagagctttgttccagcagtttctccccaccctcctgtatcactgagttcaccttggctttttcccgcaccgtaagcatgctcgatttcccggttaaaaacaaacgcgcgttccactgtaacagctgcctcctgttgccccctttctcatcagacctttcacaatagcccacacttgctgtctccatttcctcatctccccattctcaccttgagctgctccagtgccctcaacttctccaaggaggcctctccctgccaagtctacagcgcagttttcccagccttc

SEQ ID NO: 516 - DNA, 323145 bp, Homo sapiens
  source 1..323145: mol_type = genomic DNA
aatttctggaaggttggggatttttgcatttttttttttttttctgagtgcagctttaaataattttcaagaataagaaaatacagtaaagctcacttggtggaacacaggagttttgtgttctagtttaagcaaatagtttatttgaaaagtgttagcgagaggatagaaaaatgtttatgtgcatgagaagtaactgcaaaacgaaatttggcaaaagtttctcattttgaatatacataggaaagtcataacagaaaatgaaattaagaatttaggtatagttgtttgttgttcaatgaaaattgtgcctttacaggtcaggatgagaatgggagggtcattctgaatcgaaagaatcacttgttttatttggcaggggagggggagcagcagaggcaaatggatggtaatgtggggaggcgctcatgggtcagggctgcagccacttccttagaagcagcgggaggaagggttggagccatttaactgcaagaggaaatggtttctgttctttgagtactctgtacagtttgggcttccacttttagactaacctgtgaagacagaaaattacactcacactggtaatggagagcttcctaacttgtttggtacaattttcggtcataaaacaaaagcaaaacatggtttttctcttatcatcaccagaaaagggagattgctgaagtgactctcagctcagtctgggagggagttggggctggaatgagtaattaaatgtgacttaagcactttcttgtcctcagggtgggtgctttggttttaggaaaattgtacttacttataaaataggggggaagaaaagctaagaccagctcattattacttcaggtttgcctacattttcatactttggggaattggtaaatattttcaaaagatttagagaaacattagttctggatactttttgttagcaactcttcaacttttcctgtaaatactgtaggtaaaaagatattatggtagcaattatgagataaattataggttcatgaaattatgtacttgaactatattttcatcttgccgtaagtgtgttggttttacctctttctttgaaaagacatcatctggttacttggagaattctaaaataaggcttttaggaaaattgtatgtatttgggaagttatattttgttgtattatgttgctgtagccgttcattaatttcacttgaattctaaagctgccagagggaattaacaatttgtgtttgaattcatcctggtagtgcttatactgactccgtgcgaatgaccttttgtcactgactggactgttactggtagtatgagagtgtcacaacattgtcaatggctcccaaaacatagaccaaaattatttttggaaaaaaaaaaaaatactcccagaaacggtaaggttatggtgctttttgtaaacattaagagaaaggaagtcagttatcccgctatgataaaatatttaaaacaaagagaataaacagtgttgtataaaataacaaattttatttctagaaaatattttacactaactgtgcacatgcacacacccacacagagcttaaccacacatggatttcctttaataataaatctaccacatactattatattacaatttataatagcgtttttgaagacacaatggggaaagctttgtcattcatttataaaccgtccataaattacaaaagaaaggcagtctgaaaagtatgtataaagagtaaaaacaatttacaagtggacaagaattacaaaagagtaaccatcaaatacatctgccagcaactttgtaagtaagtcttttgttcaaatgccaatgatgaagatgggtatggactcatttggagcagatttaaattgagtctggttttggtgtggcttatgcattatgtggattacttgtgtgccattcattgctgtgtatttgggtatggcattttgacaacgaaagtaacagaaaaccatatgccacagaatagaacattaaaagcaatgaagataatcggctttctggaaggttggagtactggtgctttaccaaacaaagttactttctctccttttctcttttttgaatgattgagtaaacattttctgtgtgtagcctggctggctttgaaagactgaaactagtatcttaaaatgcacagcctgtacaacttgatctcaaaccactgtgtcaggatgaagaccactgaatgcacgacacatacaaagtatacactgtttttattagacagtacaaatcattgtgcatttataaggcagaacatcaaggcgaattaaactaggaatttcaagaccagagtcaaagtgaaagttatgcattatgaggcaagcattttgagaagggagaaaggttgaaaatcattcctttaagggcagatgacaaatgcacaaagactggaattacaggtagggagggagctacaggtgatagctatgcgcccccgtttgttaataagacgtcccctcccacctcccaaatcagagcttggacaatgagagcagactgccagcggtgacagagagcaaccgctcctctttgttctcgtggttggtttaaagtggttggtagtgcaaaagtgcatttctctactggtgtcaggggagaagattgggtttttttaggaagtacttgagtcatgaaagccctagtttggaattaaagaaaattacatagatttggcagttgtccggaagcacatgaatcatttcactgcacccagctttttcagcagtttcttgcctttggaaagcagcccctttttctttttcgaggacatttccctgcctctcccaggactaccagaacccatagatgacgtaggtgaccccgaatggagatggactgtgggggatggagctctccttgctgtacctgaaccctcaggaggaacctagtaggtacagtgttacagtttattgagtgtgtgagcgccaacaacagaattcacttggtaacatcgtactgtccccgtttcccaccaggaaaggtcaggggggttcatttgttctttcagttgttgaagtatgccatgagaagcaaaggtcctctcccacagcacgccagagagaggccccagacataaatgtgtgggttccgtttctctgtctcgagggagtgcggggtggccgttgctttggcaaagctaaggcaggtaataattcacttcataaatgaagactaagggcaggggagacatgatctgaaattaggttgatagtaaagttggccgagtacccatcagtagtcttaaaaagcgaaagttcataaagggaattttgttgtatttgaaactatttggttatataaaatcctgatattgttaaagtgcattcctggggtggttggtatactatagaaatattggagatggcacactggttgaaagaaaaaaaaaaactaaaatgaaccttaattataatcaaagaaagcttaaaggcccttagtggatgcttgcattatttccaaataattgaacatgaatcttcctcagtagatagcacatggtagtatttaaatatacgttaagcgcttaatagtgcttcagaggggtagacttttactctaatacgctgcaggacgacttcacctcgcttccctttacagctaagcatgtgcctgagttggcagtgcagcagcattcctctggccctacctctccagagcaactcttgccatgtgagtgtttagtattcagcaggcaaatgctgtaagccaaggggcttcaagcttgcttggatttaaaatcaaggtctaattctaatggaaaacacctagtaaagcatcccaaagtacacctgaagataccatctattccatctaatgtgatcatttgagctgcgtgcttcatcaacttagtattgcattggtataccaacaacaaacgcgtgttgcagcaacttctgtcacaggatgattgtgctttgaggaggagcatagctctctcgtaaggtagaggcagggttacttaaggaaaacacgttctggccactcgagccagtgtttggagtgttcagagccaacactcgatcacctgtgttcactactcatctgcttgaccttgggttaagtttctaaagtaaagcttcctatagtaaacatgtttgttaggttgtgctttttccaagagtggctaacaatgcaatatgcagctctctctatgtaaacacacagttagcttgttaagaaatatgttcccaatgttggcctttcaaatattcttaatgcaaatagtaggaaatgattattaaagatgatttgcttcactataaattcagttgctttacaactgagaccaagtaatattctaattatttaggtccaatagttttttgagacatatttctttgtatctttttttttttttaaccccacaatgaagccttaagtctaccacactggcccggttaaggtagcttaagttggtatctttatcggtatcttcagttgctcacttacgtgaaggctacattgcctgattaaggtgtgaaatgaacactcttcttctgtttccaagcagatgagcaaagaaataaaaatatatatataaaaatataatatagaaaaacttgcagtgatgaaataaaataaaaatgagatactaaacatgaatgtagtctaatagttcaatatgcttgagaagcccttggatccttgtgaagagactaaagtcctaacagagggcaaataacctccattgcccaccaaatctgaagaggagccatccccttttcactcttgatcaaactgaaatgtgcttctataatgtaggatgggacatttctttgtgagtaaaggcagattgattgattagaattgaaagggtctttttttgtaaaatgagtaagatttagaattaagaatttttaggtacaactcccatggcttcagggcagagaaaaaaaattcagggtgtatttacgcttttcggcccaagatataaaaatatcagtgcaaagattgtattagaccacatatggcagaacgggacagagattaaaaaggctaaataggtttgcttaccctttttgcctttgagcgcattggcgtatcttgagagtagtgggatggagcatcagaaagatagacttctacgtcatcaggcacttcttccaagaagtttgagggcacaaggcctttctgcccattcagctccccctaaaacaccaggggtgaggcagaagaactatttatttttctagaaacccacatcttgctttggctaaaggaatacagctcagagtacaggtacatggtgagtttattctggttcaaaagtggcaggacttgaaaggactctaaatcagggtttccaaattttcctcagcaacatgcagagtcctaagcccctttcctggggtcttgatttctcctgttcagtgaggagctgaggaatctgccttttggccaaagagcccctgggattcttaggatcaggcttctgaaggaaacactccttggcagatctcatttagtggttctcgggcctggctgatctgaggcactagggagctgctaaaaacacatcgctcagcacaccagcccagaccaatgatggacaccttcagacggtggggacctggtggtcctaacatgccagcaagcttgagcgctactggtctactcagccttaagactgtcctccctcttactcatggataggttattatcgtaaacattcaaacaatatggagaaaatgaaagtgtctgttgataacctcctcagacattactgcttcaggttggtatatatccttccagatctttctactcatttacatatctatgccttgtctaaagtcgagatccatgagtccatctgcctgctggtcatctgcaccaagtggctcacaggcctaccacgtcacttcttccccaaactcatctgcccataaagtgcctaaaccaagttcaaaattggctggctctgggcaacacggaatcctgtttctctgtttatatggtctaggaaatgacataaagagcctactacatcaaaacacctgtgcagtgaaggacacagcagagtgatgagtacctgtggaatgggagaaaatgtctgcaagtcatctatctgctaaggggttaatatccagaacatataaagaacatcaaaaaacccaattaaagacatttctccaaaaatgagattcaggtggccagcaggcacatgaaaagatgccagtcaccacgaatctccagggaaatgcagttcaaaaccatgtagtaccacctcacactactatcaaaaacaaaatggaaaaaacaggtactggtgaagatatgaagaaacgaatactcgtgcacttttggtgggaaggtgagatggtgcagctgctgttgaaaacaagatggcagttttgcaagatggaaagagttctgtagacggatggtggtgattgtttgcacaatgtaaacatacttaacactactgaactatatacttaaaaatgattttatatcttttttttttaaattgagacagagtctcgctctgtcacccaggctgaagtgcagtagcgtgatctcggctcactgccacctccacctcccgggttcaagcaattctcccacctcagcctcccaagtagctggaattacaggcagatgccaccatgcccggctaatttttgtatttttagtagagacagggtttcgccgtgttggccaagctggtctcgaactcctgacctcaggtgatccacccgcctcagccttccaaagtgctgggattacaggctgaggcactatacctggccaattttagataaattttatgtagattttatcacaaaaattaattggaagaggcagccccacatacttcctgcatcttcctgttcagcaacgctgccaggtgcacactcactgccctgccccgccccactcttctgcttggaccttgaaggtcctactcttatttacctgtgactgccctgggccttctctcaccggctccattattagcttatttttctctgttgacattacagactatttctaggccacctatcctttttactgtgcatgtgcccctggcgatttcttcctatcgagggtttttaataacatctaaatacgaagacactcaaaagttataaccagtcaagtcccccctcattaggtccaacagccagatttctctgccagccttagaaaagattcttcctctggctgagcaccagatggagtagttggcttatatttggggagtgtgttctgtgaacacacacaatgttatgcacacatctccgctggtgtcatgctcacaccacaagaggcgtgtgtaccccagcctgcagaggctcctgtagagccaggcctccaggccagcccctgctctggctgagtagaatgtgggtggaactgcctgcactggttattgctcttgttcttttgggctgaacacacacagccctagtaaaatccacgtcagaacgcacatgtaccatgtcactcccttccccatgtctgatgcctctaccactgcgtgctactgcgtccaaagtgacgacgggacttgctcgcggtgtgaatactgctttggcctaagttccgttctgtttggagaggctcagaggtcctgttcacacccctcaagctcaagagtttctaagccaggttttccattcaacgttgttcttatccttgcgttctcaagggcacccatcacctaggtcagaatcgaaggctcccccagacgacattctctgtccctctgactggcagtcagaacgctggataagatcatcttgagtctgccttcccctggtactgacgtatttcgggccatgtttcctgcctggagggttccatatagcatgtttcccagcctcctggacccactcccatcccccttcaaaagtgtaccatcaaaaccctttacagaataactttctctaaaaaaatttcaccttgacctttccctcctcagtccctccataatttgatctctgcttctctcctacgcctcatttcccaccatttctctatttgcggccaaacagtaactacctggaggcctaatgtccagacagaatgggaataggctgaaaggcagaaaacaccaaaatcgatcccctcccagttttctctgtgccccagtcagtgagacatccactcgtgtttgcacactcctctggattatctcccgtaccttagtacgccacgtgatggcttgcttttgacataggaaggtacaggatttaaggtttcagataccgagatgctgggctatagcaagaacagcacacgctttaaaacacgatggggtgttagaagtcttcagtgacttaatgggggctgatgtaaattatgaaatagcaaaaggaggaaaaggccagggaggacagcaggagtccctcgggggtccctgcttacgcttgttttactgatatgggatatagcagaacagagaaagaggagggtgatattacaatattaggaccggtggagtatttgaattcgctctctcgagatgtttaaggttacagatatcaaaacaaagtaccaagaaatttaagatttttggtatcaaattaggtgtcccctgtcattgtttatcaaataagaaatacttaaatgaactgggcagtccgctcagtgaacatgaccagcaaaatcatagtaaaaccatttggaggagtggtaaataaaaagaagcatacgtttcatattaatttagatctgattcccactataatataaaaacttagggaagactattcaagaaactaagaagataaaacataactggggaatagaaacatgcagacaaattagaaaaatcttcttaaattccaggaaagcccattgtttctacatgtgaaaatctaaatgaaaagtacattcctctgaagatatgtagattgttaaaaactgataagataaccatttaagcaaataaaaacttttgtgcaactgcagtctaaaaagatactgaacctaaaggatctctctctgggcagattctaataaccttcaaataatagtaattgctgtgtcacttaatctcctctaaagcatagaaaaaggttgaaattttcttagtttatttggtaattctagcataatcccggtatcaaaagctacaacaaaggtattccaatgaatacagattattattatttctggaatataatttctgaataaaatattagcaaatcaacttccagtgccttaaaaatattatatatgatggccagtaatttactgatgaaaaataagcagagcaaactaaaactttcttagcattataaaggatactttctccgtattataaagaccatctatctttactgatagtctaacctacatataacatgtaaaatatgagtggtattcctactaaaatacataacgagtcacagatttccttatctctgttattcagaatcgttctaagtgattagtaagacaattaaaaatgatgacaaattataaatattggtgaagaggaggcaaaataatgacaatctgtgggaacccaagggaatcggttgataagagaaataaatgcattcagaaaaatgatttgtgggggacatgtacacacacacacacttttccaacatgttttctaaataacagtggaatatatgctagggggaaaaatcattcacaatcataataagatctatataattcctttttgtttgtttttgagacggagtttcactgtcacccaggctggagtgcaatggcatgatctcagctcaccgcaacctccacctcctgggttcaagtgattctcctgcctcagcctccaaagtagctgggattacaggcacatgccaccacgcccggctaattcttttgtattttcagtagaaacggggtttcaccatgttggccaggctgatatcgaatgcctgacctcaggtgatcagcacgcctcagcctccgcatgagtcaccgtgcccggccgttggatctatatagttcctaagagtaaacttaagatatataaaggatgcgtaagaataaatctatgaatcttttctgacagatgaaaggaaaaactttttaagaggaggcgcatgctatgtcagaattgaaagacaatattatgtctatttcttccaaaagctaaatgtacatctaaacaaaaaagtataggtttgttgtggaggtgggactctttacaaaatgttccctcccaaacataaaaatgcattataaaaatacaataattaagacagcatggagtagtgttaaagtccataaatactctaagtattaaattcctatttacactttaattttaaaacgtattcattttttattattaaaaaatgatttttttaaagtagggaaagtgcagattatttagtaaatgtgttgagacatttgttctcatagttaggaaaaaatggtagatacttgagatttacatgtggaaagtgaaactataaaattgaaacaaaatgaggtgattatttctatcaccttgaaggaccttttaggcatgacccccaaggcagaaacatttgaccgcatgcaaacgtgaaattcatccttaataaacaacaaaaatggagaagcaaacacacacacacaaagttaaaaagcagaggttgagctggaaagaactatttgaaacacatgtgacaaagtatgaatatcctcaccaaaggcaaatcagaaaccaggcagaggagagagcctgggaatcctacacatgcctgcggctgtagcatgtttgacttgaagagaaacctaccgtccaggatgtcatcagttcttgccgattctgataaaggcggtgggggagcaggtggaaacacatgtgcaaggtggggacccccactgggctctgcgcagggtcctaagtggccctgtgggcttctggtcagggaggggcagctacttgtaaagatgccccagctgcggaaactctgagataaccccaccccattccctccctttgccccagggagtattcaagacatgctccaggggaacagaaaaggagggagggtggctctgaggtccctgccaggaatcaccagcagcaaggggtgggggcggggtggggggttccaagctgctaacagcagttggctctagaaaaaaggtaagggagaagtcctaaaatctgtggggttttaggtttttgttttgttttgtttttgcttatttgtatttcttccttttcctaaaatttatttttgacctatacagttaagtaatctagaaacttaaattgttttgtaaatgtttgggtggcagcaatttaaaaaataagaatatgaatgtatttgttttgtttacagtgcatatacattgaaaacactagtattagcaaggaagaaacaatgaagttcacagtcccaactttctagattatctataactcagcaaagttctataactcagccaattaagcaaagctatcagcaggcgtatgacgttcatgcccaattttaagagaaggaacggactagcaaaacaaaacacacaaaataaatgaaaatacaaaaatcaaatggtacttcttgatatttcaaaaacttacataataaaatccatcttcatcaatttcaccaaaaactgtaataatatctcctgtgcaaaatgtaagttcggcctgtggagatgaaacataaaattaatcgtatttttctacacaacagtagtagttttttaaaaataagttctctatgctttcccttactatttgagaatttctggtattaatctactctttcagtcaaataaaggtagaagctaatgaatggctctgtccacagtcttctagaaagtaagaacaaaccaagataatgtgcacctaaaaggaaaatgctgcagtgctttgattttggccaaaattcaagattattaccatgttctactgataatacatttttaaagctagtgaaatggttaattgtaaaaacctggaatattagggaaatgttctctgcagtataaggaccattacgtaaatatcctttcactgagtattttaaaacctactcaattattaatgaaacatctatttatttattgagacagaatctcactgtgttgcccaggctggagtgcagcagtgcaacctcggcccactgcaacctctgcctctcgggttcaagcaattgttctgcctcagcctcctgagcagctgggactacaggtgtgtgccaccaagcctggttaatttttatattttttatagagatgtggttttgccatgttgcccaggctggtcttgaactcttgatctcaagcagtctgcccacctcccaaagtgctgggattacaggcgtaagccaccgcacccagcctaaacatctctttattcagtgtctacgatgggccgggctgcagccccaaagcaggcggtgtcaaacacgccccactgccctcaggggtccaactgacccagcacatttcagttcccagtcacccagcagaacatggaagcagaaatctagacaatattcacaaccaaacacattttctttctaaatgtcaaaatgagggaatatagttggtgagccagtggcttgtcagagcaaagtactgtgtaacatgggttcacatacatcttgtcatctcagctagtagctgcagagactggagaccccacctctcatttctgaaggcagtggtttcagccttcaagacaccaggcatcccaagctgtgccaggcgacacaacctcacctatcactggtttcctctctactgttctatgtgtggggcctgactgctttgcttttgtttgctgaccacatgtgatgggcttttatttctctcctaaagatggccctcaggtggcatcaccattagatgtggatgacagattgttctttctgtcatggcacaggaaaatctgggccatggggacagggcttgtcaggggctggccatgtccctgggaatcccatgatttctctcctgcgtggccatgtctgtatcagccatccctcggatcggcagcccttcctacggatggttcggagagaaggaatgaggaggtgaacacacgtggcctcagtgtggtgtaccacgagggaagggaagggtgtggttgtgtccgtcatgaagtgcagtgtttggctggtacctcgacatcgacgttgggcgagctttctctggggtcgtagtcatacagggccaccattctccgcgtcgataccgaatgacgcctgccacttctcctgcttctctctgttcagatcacaagggggaaagaaatccatcatgaggttatttcaaacttagcggtgttcccctccttccgggtcacacatggccaatacagccgagacctggcactgctaacagggccacgtgctcctgggcactcacatcagcaaacgtctctactttgggtcagtggtctgggactccatattcttatatttttgctgtagtatggtttctcccccttagactaacatgaaccttttccttcctccagtctgtccattaaaccagtgagactcacatgaagcacggggctctcgaacagcaaatttagacggctttggccagcacggggaggccgtggcttgggaggccctgcagagtgcacggttgtgacattgctctgggaaggccccatagacacagttttaaaagtgcctgtttgtgtaactatggtggcgctacaaaatcaagtcatgctcccctaagcataggcaaaactaaggcactgtcctcaggagaagcacgaacataaacagggatgccttctccacccagcccagtggcttccctcatgctgcttccctggcatccttccattgtggtttagcagcggccgtagagaagatcccagctctgcacagtcgacttagaggtgcattcccacggcctggctctgtctctgccacagatcggggcctgggcatcatcccagcacactcagaagcataagaaggggctgcagaggaattgccctaggctctgcccagcgtgagcgctccacacagataacaggtgaacactctcaggacgtaaggaggcctcagtgcagagccgcagaacctggcccaatcacgaaacccctgtcagactgaaggggtggggctgtgaaggactttcctcctggcgaaagttggcatttatgtgtttcttctaaacacagccactttttgcttacatttgatttggggaattccaaacatacagatgaaaactatcaaaggcaaatatctcaacggcaactaaagtcagcgatgtggcttttcagtggttttcagcaggtacaggggccagctgtgtagccctgcaacattccagcgattactctccccttgggttctggttaggagccactgctgtagtttacaggacgcacacacgcctctgtgcacatgtgtcctctgcaggacctgcacatgtgtgtctcctccagaggttcgtgtttctcagcattattcatgttacagggaatgttacaagtatgacttttgaaaggtggcataacaacatacatgtacttctcactgaagtcaaacttacatacacgaaggctcactcttcccagcgtgcagtactttacgttgtgataagcacacacagtccagaaaccccacaacaatcaagatatagaccggccatagtcctctgtagtcacttcagcccagatgaccacagatctgtttcctgtcccagaccttgaccctttccagaatgtcactaaaagggactcatacaaaatgtagcttttttttttttttttttttttttttttgagatggactctcgctctgtcgcccaggctggagtgcagtggcgcgatcccggctcactgcaagctccgcctcccgggttcatgcgattctcctgcttcggcctcctgagtagctgggactgcaggcgcccgccaccacgcccggctaatttttttgtatttttttgtatagacggggtttcaccgtgttagccaggatgtttcaatctcctgacctcatgatccgcccacctcggcctcccaaagtgctgggattacaggcgtgagccactgcgcccggcccagaatgtagcttttgagacaggcttctttcatctggatgacgcctctgagattcacccctgtcactggctgtattagcagtggctctgttccattgctgagtaggccccattgtgtggggcgccttcgttctgtttctgtcaccagctaaaagcacctgagttgtttccagattttgatgaccgttggtcaaaccactattaacaaacattcatgtacagtttttttgtgtgtgaacgtaagtttccctttcttctgagtaagtgtataagagggaagttgttggattgtattgtaagtgcacatataactttacaagaaaccagcgaactgttttgcagagcggtgatgccattttccactttcaccagcatgcacaggcccacctggcacactttgtgcccacacctgcgacggccagccgttttaatcttagccattctcagtgtgtgtgcattggtttctcagggtggttttaatttgtgtttcactgatgatgttaaagatcttttcatgtgcttatttgccacccacatatcgtctttggcgaaaggtcacttaaatattttgtacatatttttattgggttgttttcttattgatgagttttgaaaggtctttgtgtattctgaatgcaaatcctttttccagtgggttttacttgcaaggattttctgccagcctgtggctttttattctgcactttttaagtgcagagtatttaattttggtgaagcctaacattgactttttccttttatgtatcatgttttaatgtcctgtcaaagaaatcgttgcctgattattataaagttttctcctgtgttttcttctggaaatattagagtcttaatttttatacttgaaactatgatccatttttatttaagtttttaatatggtgagagtgtggttaaggttcattttggcatatggatgtgcagtaatgtcagcaccaatgattgaaaagagcatcctttctccgttgaattgcctttttacctttgtccaaaatcagtggactccatatgtgttggtctgtttctggacttcattctgccccattaatctatgtttctatcctttctccaataccacgttgtctcgattagcatacctctatagtagtaagcttgcaattagcttatgtgaatcttccaagcttcttgttcttgttaaaaatagttttggctactctagttcctttgcctctccatatacattttagaattagcttgttgattctacataaatcccagcacagatttcgaatggtcttgcactgcatctgtaggctcacttggggcagctgacataccaatattaagtccatgaatatgatctctctgtccatgtatttaggtatctgatttctttcctcagtgttttctgattttcggcatacaaatactgcacgtgttttgttagacttaatgctaagtagttcatgttttgttgtgtcattgtaaacggcactacttttaaaaattttaatttctaaattttcattgctcacatatggaaatagaactgatttttgtatattgaccttgtatccattgatgttgctacactccatttgttagttctaggaacttttttatcctttgagattccttgagattttctaagtagatttccatgtcatctgtgaacagaaaaagttgtattccttcatttccagtctgtacaccaggtgtgacttcccctcaccatgtcgccctggttatgacctccagtatgatgtggaaaaggagtggtgagggccgacatccttgtctgtgcctggtattaggaggatcacattcagcctttcaccattaaggatgatagtttctggcaatgcggcagggggcacatagatatatcaggctaggttcccttggccatcgacatttagaaaaatagcataaaaaattttaatctaactgataaatcaagttaccgttccttaacagaaattcttgtatactttctgggtctgtggtgtacagggcctgtgctctctttgaaagagtcttagtcaacttcgggaaaggagatcttaacaaaagtgagtagaggggataaagggctcaaagatcttcgatctcatggatttaatgtgggcgatatattcacactaaacttcgactattagatgtggattctgtcttgaaacaatgcgtttattaatgccaaaaaaggttgaaatgttttgattttgtgattatccttaaaattatgtatattctttgaagcacagaattttgtctttgaagtctgatttagaagctaatcaagttttgaagtattaaaccttaaatatgaatgatataaaactgatatctctctacagctttttagaaaaagcagaggctttttttgagactacagaggctttttttaatgaggacattgttattgcacgtggaaaaaaatttaaaactcataaatgtaatgttgcttaaaaaatcactgaaaatagttttgctgcattctcactggtgcttgcagactggcttaagataaatgaaggagtttcatgtctacccaaactaaagagaaaagagcttgtgcctcttggataagcaaaggtcacctaaagaatgaaaggcatagcggccccccaaccacccactgaaatttattgtagacaggctgatgttcaaaccgtattaccagaaagcagctaatcatgtgttttctagatgcgataaattgtttgcaagcaagacggtacttcatcgcccattagatcatctgtgtcttcacacttaggtgtatctgtgtccctaaagcacacaggagactactggcagtcctggttcgtagggtggcttttgcccaagaaaaatcactggtcaacatttacatgactttggcatatttaaatgatgcaatttggggtctcctcatcaccgcctgcctctctgagcggcaggtgttttgtgggataaaatgcacagggaaggtcgaataggggtttgcgcttacctattttctccacaggtgtattcagagggagaaagccctgtctaagaagctgatccatcatctcctcatcatctgcttgtatctcagagaccatgttacaaggaataaggccaagccgggcacaggtttccccacggtagaatccatcagcgtctttatcaccataaacctagagccaagggggaaaataaatcaagcactgtaattgattggttcagaaatacaatagtcccactgacggtaagtgagtgtagtcgaaaatatattttaaatatagtttaaaaataccataaatcacctgcataggtcacccacgtgtgtgctgtggatgtgtacatgtaaccctcgctctatgactctgacttaagagccagtttttcatctagtgtttggacaacctgccattcttctcatcaggcagggtgtttgcttggatgaatgcatgttatttaaattcacgcacattaaaagggtgtgtgatgagaccccactctaccaagaaggaccaggtaggctgcacaaagtggtgtttctgtctgcctgaaatgggttcctacgtaacaagatagtgccacatagcaggcattccgaccgttctcaaatgccaactgtcaggacccttgctgaaactgcaaacagggttcaaggccctctttctttcccctctcctactgaacagcacactttctctcattttccctacttgagactcacaaggctcctctcctctcagaaggctggatctcacggcctgtaatcccagcactttgggaggccaaggcgggcagatcacttaagatcaggagtttgggaccagcctggctatcatggtgaatccctgtctctactaaaaatgcaaaaaaatttagctgggtgtgatggcgcgcatctgtgttcccagctactcgggaggctgaggcaggagaatcacttgaacctgggaaacagaggttgcagtgagctgagatggtgccactgtactccagcctgggtgacagagcaagactctgtctcaaaaaaaaaaaaaaaaaaaaaaaaggaactgggtaccaaagggataggaaacaacctccatcaggtgtattaaagaactaaggcatggaactccagcctctagctgctgatgctcccttcttccctttttccctccctttccctctccctccttcctctcttccctgcctgtctgctgactgacaagtgttgttttaaaatttggagcctgtgttatttttctcaacaacgtaggccctaatagaatccagagttcacaggacatatttgggtgtgtttgtgtgcacacaaaccgggcagatgctggagaaggcactttgcagagggcagggcccttgccgtcacagcaccatgccacctcctcccgtgcctcgcccatggcctgcaggagaaggccatctctaagtcgataccctgttgccagtctctgcccccatgacccagacccgcctcaggggctgatgaagccgcccgcaggcagccatcccgcaccttgatgatctggccttctttaaagggaagctcctcctctgcagcatctgggtttggggacatggtgagcgggtcgtagtcaaagagagccacaaagatccgggccgggagctcttcggcaccagggtcagtttctgactcttcatagaagtctggagaaaggcggtctcgcccgtaatcgtctgcgagcaagtgggggtgaagaacagagcggcagtgagcctaactgaggagcgtgcacgggaaatgcagctttggaaagcagtgaggatggcagcggttccttgacttttgtcttttttgtgtcttaacatgtaggtggaaatagatcgggaggtctaggtcagatgaattggagaagcacataaccacagccacactctgtacctggccacactgcatgtgaaagcattgagacagggctgggcctcgggggcctcctcagagagcacaggctggggcaggggctgcggccgtgccaggggcaggatggcccatgctggggagccttcccaggacccacacactctgcaaaatggaaagctaagcacagcccacgtttaaaatgtttgtatgttagtcaaagtccatagaggtgaccaactgttcacttacgtaaatatgtaactggcaacaaatgcatccttattacagtgaattaataatttcctggtgaattgggtttcaactccatataccacccagcttccaaaagtggttcttttggactagaggaaatggatacattcctagacacacacaacctcccaggattgaatcaggaagaaatcgaaaccctgaatagaccaatattgatgaaatgaattcactgctgaattctaccaacatacaaagaagagctggtaccaattctactgaaactattccaaaaaattgaggagaaaggactccaccctaactcattctatgaagccaacatcaccctgatacccaaatctgacagacacaacaaaaagagaaaactacaggctaatatccctgatgaacacagatgcaaaaatcctcaataaaatactagcaaactgaatccagcagcacatcaaaaagacaattcaccatgatcaagtaggctttatccctcagatgcaagattggttcaacatatgcaaatcaataaatatgattcaccacagaaacagaactaaaacaaaaaccatatgattatctcaatagtgcagaaaaagcttgcaataaaatccaacatcccttcatgattaaaaaaaccctcaacaatctaggcattgaaagatgtacctcaaaaatagtaagaggcatctgtgacaaacccacagccaatatcatattgaacaggcaaaggctggaagccttcaccttaagaactggagcaaggcaaggatgcctgctctcaccattcctgttcaacactggagtgctatagccagagcagtcaggcaagagaaagaaataaaaggcatccatataggaaataagaagtcaaattatctctcttcactgatgatacggcatccatataggaaacaagaagtcaaattctctctcttcactgatgacaaggcatccatataggaaataagaagtcaaattatctctcttcactgatgataaggcatccatataggaaataagaagtcaaattatctctcttcactgatgatatgattctaaacctagaaaaccctgaagactctgctaaaaggctcctaaaccaatagacaatttcaataaaatttcaggatacaaaatcaatgtataaaaatcagtagcatttctatacaccaataaattgttcaagctgagagccaaatcatgaatgcaatcccattgacaatagccacacacacacacacacacaaaatatacagaatacatctaaccaagacacacagaatgtacctaaccaaggaggtgaaagatctctacaaggagaacgacagaacactgctgagagaagtcatagatcacatgaatgctaaaatattccatgctcatgggttagaatatcattaaagtagccatattgcccaatgcaacctacagattcaatgctatttctatcaaacttccattgtcattttatatagaattaggaaaaactactctaaaattcatatggaaccaaaaaagagcccaaatagccgaagtggtcttaagcaaaaggaacaaatccggaggcatcacattacctgacttcaaactatactataaggctacagtcactataatagcatggcactggtacaaaaacagacacacagactaatggaacagaatagagaaccagaaataaaaccacatgcctacaaccctctgatatttgacaaagctgagaaaaataagcagtggggaaaggactccccattcaataaatgctgctgggataactggctagtcacatgcagaagattgaaactggactcctaccttttaccatatacaaacattaactcaaggtggatcaaagatttgaacgtaagacctcaaattacacaaatactgcaagaaaacctaggaaataccattctggacatcagccttggcaaagaattatgactaagaccacaaaaacaattgccacacaaacaaaaattaacatgcatgacctaattaaagaacttctgcacagcaaaagaaactatcaacagagtgaacaacaccctacagaatgggagaaaatatttgcaaattgtgcatctgacaaaggtctagtgtccggaatctgcaaggaacttaaatcaacaagcaaaaaatgactccattaaaaagagcaaaggacatgaatagacttctcaaaagatcacatacaagcagataataaaatataaataaaaaatatatttaaaaaatgtataaaaataaataaaaatgctccacatcactaatcattagagaaatccaagacaaaatcacaatgagataccatctcacaccagtcagaatgacgattaaaaagtcaaaaaatagacgttggggtgactgcaaagaaaagaaacacttaaaaatgtatataccattggagggaacggaaattagttcagccactgtggaaagcagtttggagatttcttggagaacttagaactaccatttgacacaccagtgccattactgggtatatacccaaaggaaaagaagtcgtttcaccaaaaagacacaggcactcaatatggtgatcgcagcactgttcacaatagcagggacatggaatcaacctagatgctcatcaacagtggattgaataaagatgtggtgcgtataccacatggaatgctatgcagccagagaaatgaacaaaatcacgtcctctgcagccactggaggccatcatcccaagaaaattaacacaagaacagaacaccagatacctcatactctcacttataagtgggagctaaacattgggtccacatagacacgaagatgggaacaacagaaactggggaacactagatggtgaaggagggagggggcaagggccgagaaactcctgacggggcgctatgctcactacctggatgatggcatcatttgtaacccaaacatcagcattctgcactatacccatgtaacagacctgcacatgtaccccagtgaatccaaaataaaagttgaaagtttattttaagaaatcaaaacaattattttggaaatcctaatacatatgcatatatatacatgtggatcactaaacatcattagatagatgtgtacatatgtgtatatatgtatggagagagaatgggaggggagagggaactgacagataatattggtctgatcatgggaggtggtctcacaacaccatcagggaagcaagtgagaaacacgccagctggcagcagagagagcagcattgggagaagcagcccagtgtgagcttctgtcccagcacgaggaacacaggtggtgggacgagatgacacaggtatgcagaagagacaggacaggtggtggagaaagaaccaaaccgtttggcctctttcaccagaaaaaataaaacacgcagtctaacaaaagcactttggctgcaggaaaggttgaattttaaaatgcaatgaattgtttacattattgagattcagagtcttttttgaatgcctaatctaaaatgtcagtaatttctgccagggaacaaaccttttccacagcagccttcattaatttctccaggctgttatgattttgttgatagtccatgaaaaaacctgacttttttctagtttcaagtggtatctgagttcaatagaatgtgaagcgctccatggcctctacaacaggcacagctgtgcagcccctgctcacacccagggatgatggtggagaacagctgtggctgcatgagaaggacgcctgctttccattctgctggagatctgctggaggaacttaatgaccatgtcagtgtgatctagtgaatgcagttccaggtacggaaaaatgccagtggaggagaacctctggctacaccattttccaagcaagttctcagcacttcccagctgagtttatgtggcaagtttgtggcatcaaaacgtgcagaggggtcaggggctaaggtcagattctagagagagttgggtgtggtcaacataccccttgaaaatctttcaggtccctcctatagcctacgtaagagtgcattttctcagtaggtggcttatactcaaggaccatgatctgtgaaaacatctttgtgtcttcaagtccaaactcacatggaccatgcaactggccacaccacgggaggcatttaggcagacaccccaacacagagctgcctgaggccagtcccccaacgaaggctccttccagagaactgcccacaatgtcacgttgttttggggggaagacaggtgtggggtagaggtgggtggagcacttggagttgaacgtatgtgaataaaatcagcgtatgcggtgactccaccgtatgttcttccagagaggatgcactggatgtgttatgagcaccaaacctcgacagggaaagagtagcagcctccctggaatgtgtccatggaaacttggcttcactgcagactggactgggcagttgggggtcccttgtccttggtgatggcaggcgagactgaaagaagcacttacctacagctgtctgtctgaccctggggggagtgggcactgcctcccatcctgctgaggaagtgtgctggcccaaggggtctttgttaggaggaagggtgtgcatatcgtgtgggagatcagggctcatgcctggacgcctgggtgggctcccaaatccactggtgccataagaataagcaccgtcttctacaggagagaggtttccctcactacctggcccagaccgactgccctcactgctactgtccgttgtaatttctatggagataaagggaatcatctattaaacagagttgacagcttttgattttttttattgcagggaaacctgaagaaaagagctcccctttttaaggggcaaagctttgtcaatagagttactaatgtttttatttttcctccctggacacaaagaaaacacgctggactttcctcactttgtaggctcagtagccaaaataacaaaaaatgggagaatacagaggagatattcagagttgattcctaagaacagaatcctcttgaacgtggtgcttcggttttagaagagtgaagctacaggccttctgtctgacaggtcaacaactagataaatgcaaagaccaaaagttataaaggataaaaatcaaacctaattaagtatatatttgaagccacataattttgttttttaatcatgaaggacattttttaaattttggaaatccagaaaatattaaaatttatattatttttcattgtaggtccactgcttattaaaaataggaagtgtatggtttacagacttaatttcctctgaaaaagataagtaatcctttgaaatatagatttctaaaatattgttttctagtattttcacaagaaaaatagaagtaaatgacaactagaggaatatcctgtctgttcagctgtcactgatgttcatttcccaaagctctttgccgagtcctcctcctcctcaggtgggtgataagcaccctccgcttctgtttccttttgaaaccataataggtgctgagatgtgtatttgtgtgtaaagtatctggttagagttattttatgtggtgtcccggcttgctacatgataagaagtcagcacaattaaagcaaacctatcataggtttgtcagttaactcttttctgagttatgttcagaggctttttccttgttaaggtgttgacatagatttgctctttcacccaatttaacaagtgtgctactgaaattaagacacgcatgcagcctttggaattctacggcttcagaaaaatccaaccacattcatcaaaagtagtttcatttgggaagggtttttatgatactaataaaactttaaagcttctcactgctgatgaatgcagttttaaaaaaaaagtctcaacaatatacagccatttgaaaagcaatactgatctaggaaaatagcaaaccaaagcggagacaaaaaataattatttaagccaatattgagtctaagtccaagcaacaagacaacccaggacagtagatttaaaccagactctgacagcgagggtcaccctggcaagactgcaggcccagggttggttttcttggacttcctggctcaagtgctgatttgtcacagcacaattttcagttctcagtcctaggagactggagtagaagacctaccatgcctcttccaaaggacgtcctttctgagcgcctacagcattaacttctcagcggctacaccatccccaggtcacttcctgagccatgcttgcagtcttcactcattaaagttacagtcaaatgaagactcgaaatctcaccctaaccacagagagagaatgagagccttgaacagggggattggccttttccccacatcgtttctcaaggcaggacatctcggacaggtcatttaacatgaaagccaggagaaccgatttattaagctccatagtccctccagagggaacgacacacgaattgaatgaagatttgagagacacacactaggtttagaatacccgaaaggaatctgggctccactaaccctgctagctgatctgtaataagtgccatcaatgttctgtgagcctgactgcatcttttattactcagttaactgaaaatacggtttcctaaggatctttaacattgcatgaaatttttaccagagaaacataaacacaatctaaaagctgtgaagatggaatttttttcttattgtttgaattgtacaaggaagaaaaagtctggcaggacacaatttcaaagaatctgttttgctttatgaagcctttcttcattttgaattgatggaaaagaccaatggccttttaaacttcagctatttcaacgagattccaggtggcttttcagtggcctagactatccagaagttatcctccttgagccctgtcatgccaaaccaagacggtttctcctcatctatttctgctgtatcaagagttctccctgcatttatatgtgtgtgtgtgtgtgtgtgtgtgtgtgtgtgttttcatagaagcctggttcctctgtgctgatgaccagcttccattatcttgtgcataatactttttggaattctccttgccatgattgattccaataatagaagtatccccctccatggattgattaggatgactaaaacgatagctttcagcatggctggctgaattccaaaaagtcaggaagagaatggaaacggaatgccagatgacgactcatgagcaagggaggtgcccagatggatgtggggagcacacatttcaggggcacactcagctgcacggtgtcccccaggatttagctctgctgccagcgtgtcttctgcagacaggcagcattccctcgggtggggctcacagacccctgaggcacgctgacatccagcttctgcacctgccatggactgtgaccctgagtgtcccagggagcccatgccaggatgagggaggtgacacaaagtggtccccccttcagtgcttaccctgtgaagctctccaggaaaaaatcagctgggagaacatggatgtagaaggccaatttgatatttcaagaatacttacaaatagctttcatttatcttgtgctgttcctgccttctttttgccatgaataacagtgttctttgcttagcggaaaatgctactcctaaagttttgttcatgcttagatggagtaagcagccacatgctccgcggctgaaagacacaacagcgatgatggggccactaaccgatggatgggactgtcacgggccgggacctctgaggaccagcgctgccacggggaaacctccggcccatgtgatccacccgtcctgcagaggctgggttccctaaaatctaaagacaaaacaacaacaaagtcgtaagtctcgccagcattgggaactgaagaattcagttagccaaatcaagcgggttgaaaagcagaatctgtaaaggcaactaaacttagcttttaactgaaaggttagctgaatggcctgggagagaacaaagccgggcaccagcaccccactgtctactcggagccgctgctgggcgcatggtggggtgagggcaaaaataattccttgtgggggggtctcttttggttgctgctgctggtgctgaagacaaatgttttgggaccaaagagacaatggcttgaatacatcccaccccgccttggctccttggagcacctgagtccctcttagtctccacatgcccccctcccagctgtcacgaaagtggggaagatgttgcagttcctcctgtcctgcttggataaaagtcgtatgtgaggtttcaaaaaactgaaagacggaagtttctacattttatcagcttcaaaactcaacattctactcctaatctgaaaatgctggtaacattctaggactcagacgggtctcctttctggctaagttcacctctaaattcacctttagatcagggttaggattgactaaagacaatcacagcaaaaccttcttcttgctagtaagtaaatggagtgaggaagttctcaggaacacaggcatgaatggtgggaagggagtccggggatgaggcgtgtctgctgcagaacctgtggcagggcaggggaggctgcgggctgccgtgggcggctgagtcactgaggcacggatctcgcacctctcctgggtgggcccatcgcaagcacacggcctcagacccaaggcctggcgccatgtggatggctcacctgtgttttcaatgaaaaggtcagcatgacaggagcaaatgttccgaaaagaggacacaatatagagatgaatgaagccttcaatgaatccctatgctcaaaaccaacaacaagcccagacggcagggccggcggggagaaggctgatcatggaaaatttgttctggaaactgtgggcacagaaaagaaatgggaaaaaaacaagaactttggaaacaatatgcaaaaaaaaaaaaaaaaaaaatagatttcttcaatctttttttttttttttggttataaatgtcagaaagcaatgaaaaaaactccaaaataacaaggaaaaaaaaccctcgacaatactagtagtcataaataaatccctaaggatccctgtgaacacaaacatgttgccaaactttcagataatcacacttcagctaacccttaattaaaatttagattcagttgtcctttaattcaagcagccatactcattactgattctggggggtggaaatcattactctaagcacagtaaagaaatcttcagcatggtcaaaaggttgggaagcaaatcggacttgagaaatcaaaaatgcagggaaaacgaaagacagccagcaagagagtccccagggatggacaccagaacaaacagaaaaccagtgaaaggatgggacagattggtttggcaagcggctgtgaaaaggaagtttaggtcacacaccagggggccttgtgcgactctgggaggtggctttgcgtggggggcagctgccctactgtcgggcatggttatgcttttcttccagacaccccgaaaatcttggtgctcggtgggctcgccccagccgtgcttcctggggggcggcctctccgggccgggctgggggtcgtcgttcctgaggaggccaccagggcccacctgctccccaaagtcctcctccacgctgctctgccgggtcagcgtccgccgccgggccagcagcggcctcgggcccctcctgcagggacagtgaccagggcctgggctgcacgcggccacggtgtttccgaagccaaaccgcgactcgtcctcttcactcccacagtccaggccgctgtccgggctccgggtggccgagcggctgaaccgacagcccctgtcttccagaaggaagtcctccacgtgggggacggcccccgagcccctgtgcttcaccgggaaccaggagccccgaggggcctcgtcgcccctgtagggcctgccgggcctgggctctctggccagccccgtcctggccctgggggacggccctgcaccctgcttgtgtagcagcccacagcactctccgtcctcttccgctacttcggggatactgaaaagtctcttcctgtggggctggtggggaaactcgggctgctcccagaaagtgccttccgaggtcctatggtcagtgcagtccttacggggtggtgtgtcaagaacaggcgcgggaaagagtgtgtggtcagcatgaagtgggggccaggggaggaaagaaaatacagacagaattagtcctggaggcaccgaggggggggaagcatgcgtctactcaggccgggggcatgccgtggagggctctgcaatgaaaacagaatgggttacggggctggggcggggtggaggctgaggcagagcacacgcagagccagcgggccgggcaggagccagcgccatgcatccagccaaggagagggcaggtgagatcccggcggcacatcaggccccacagtgcccacggtaccgctgctgtagatggtgggtgtggccacggtgccaggggagactgcccgggggctacatcctcagaaaccctgagggcagctgccactggaggccgtgtgtgactggagacagttcaccagacacggagcctgacccgtccctgtccatccactgggccaacttcccttccagcgctcggcaccctctgcaggactttctagttaggctgacgtgtcacccttctccctaagatacaagctgcgtgaaaccacgccatccccggccccaccaacagcgcccgcacaccatcgtgcagagtctgtgtcagcaaaggactggggtccgcctgtctcctctgcatcctgcatcaagtccctgagagccacacttgagccatcacagtctccagtgggtggcacagagctggccacaccgggagctgcttaaccagaccagtgtccatgacttttatactgcccgtctgcacgccatcactctctgccggggacagccctcaactcaccctctacccaaagagcatgaaggactcctgactggtctctccttcaagggggcttggctgaccgcccaggcaaagcgtgcccctgggtcctggccgtcggccctcgggatgctcagtagagatgagccacatgggcacggaacagggccacttgtctgtcccccctcttgctgtgggccccttgatcttggggaccatgtgggatttgcctaacacagggtctgccatgggcctgggacttgccacaagccaggtgaggaggcatcggggcacacactgtgcagctgatagctctctcccttcactttgcagattcgggagcacatcagctaatattggagcgaataaggacatcgaaaacaaaccatccttagaggacagggatggcaaccccaggcactttccaaggcaggcgggaatgagtgaaccgggccagcgggggccgaacatctgccgtgcccatcagggatccggctccgctacagctcctcactgccacgtgagaacgtgtgcgctgagtggccagatctctgtaccacatcttgtaatttctaaagagaacccagaaatccagacctgcctacatgatttctattttttttttttttttgagacagtgtctcactctattgcccagtctggagtgcaatggcgcaatctcagctcactgcaacttctgcctcccaggttcaagtgattctcctgcctcagcctcccgaatagctgggattacaggcgcgtgccaccacgcccagctaatttttgtatttttagtagagacggggtttcaatatgttggtaaggatgttctcgatctcttgacctcatgatctgcccgcctcggcttcccaaagtgctgggattacaggcatgagccaccgagcccagcctcctacatgatttctaaaaccagacaacaccttgtggatgggagagggaggctgctgccatcctggccaagctccagccccggcgatccccctgttgctaagaggtggagggagtggggctgtgcctgtgggggtggggctcagcccaggaactttatgatgaactcgcttgaccctgggccaccttctgaggagagaaggtgacattatttctctactgagcaattcccgggctcttcctccatcaaaaggaaaggcatcagggggcgggggaagaccagctgcccgcctcaccgggcctgactcatgggcactttttcggagctcctggctctggggcacacagaggggtcgtggggtcagactggaccactccgcaaaggccagtgtgaatctgctccgtggtgtcacctgggagcggggacggaggagctgccggggatagcacgtgctgcaccatgcagggtttgcatagggatctggcatgttctttggtgacaggacatcccccaaggccctgccaggggcctttgccaggagaacataagtcagtcttgtctatgcaagtaggcaccgagttggcaggccagatttggatgagtcttctgtccaccattcaaaatgcacgccctctgttcctggagaaagcagtgctgggaagcttcgtcccgggggatttcctctccaaggcctttttcatttggaaaacccacaaagctcctaccaatggcttgcctttgtctgtctccccattaggttgggacctgaagagggcaccccttagcctagcacagggcctggtgcatagagctggtcatcccgcactgccctgcagagcacatgaatgcgggagtcggacgcactggccagcaaccgcagcagcaatgacaaacatctccccaaggccaggaccaagggaaagccacgtggatgggaaacccaccctccttggctctagggtgcctcgagctcaatattcctgcaggtaactgcccgtcgaccccttgctgatggcctctgccagagcagaagggagagggtctagcgggaggtggtctgagcaggtgcatggagcctccagcctgtctttgaggccggtgtgatcagatgtgggacacccatctcttccgacctcactgtgcttgacccctgcccaccaccaggcagggccaccatagtgccctcctttaaggagctccctgctgaccacaccgtcctggcctccgctttacatttagaggttgatgcacgctctctcggctgccgattctctcgagatgagacttaaggctgtggagggggttcttctttgttctattccccccacttcagttcctggcacagagctgggtgccccctggagggtgccaaatagattcctctaaactcctttacccagaccttttggccaagagcaagacaggagtgtaggtaattcccaaatgcagattcaatagtgagaaagaagcgaatccaaatccgagggctactggttgtagggcaaggcccctctggagcctgcctcaccagccccagcaaagggacgtggatggagctactctggggacggagtgcagggtcccccttccccagccactcaccttgagggcattgtgggacgtgccgctgggccgcctccttcccccatcttccagctgcatttcagaatacagctcctcctcgtcctcctccatgatgtctgagaggtcagacccccggctgctctctgtgtggtactcgtctccatggcaacagtgcggctgggggccaagaaaaggggctactgagcgggtggctcctcccgcatcctacaagaggccagattgagcttgccaaccctttccctgcttcgctgactcacggggctcacaggcctagagacgggcacagggtgtgtgttactcgttctggaaagtgaggctggagagaggacacacccactctctctgttgaagtggcacagatgggatcagcgcaggtctctcagctccaacaggtacagaaacacctgagctctggacaagatagaaaacccactggggcttacaagacacgcgggcagaatgtccatttctgggcaccctcagcttctccaacttattggctggacaaaggctccaaactctggtgacggtggggatcagtgcacaccaggtgtaccctggatccagcattgtgtcagagaggcagggggatagtggtaaggtgaggtgtatatgtaccataaaaagacacttaggcggggcgcagtggctcacgcctgtaatcccagcactttgggaggccgaggtgggcagatcacaaggtcaggagatcgagaccatcctggctaacacggtgaaaacccatctctactaaaaatgcaaaaaattagccgggtgtggtggcgggcgcctgtagtctcagctactcgggaggctgaggcaggagaatggcgtgagcccgggaggcggagctcgcagtgagccgagattgccccactgcactccagcctgggccacagagcgagactccatctcaaaaaacaaacaaaacaaaagacacttaggtttttaaaacatgccacgttgtctaacacacacgcgcagacactggcagacagcctggcctggcaggaggtggagccaccgcacagactgtgtgcttactccgggcccagctcagcctcagcatgagacgaagattgtgcagatagtaggggcactgggcggaggctgcggacagcagaaaggcttcaacaaaaaaagtgtgtttaaatgaagaggctacctggtaacatgccagcttggagacagcgacagccctggtggtctctcccagtgatggtgccagcagcagccgctgggtttccactcacagagaaagcacctagtcacgtggtaacggtattcaaagcaaagtaaaccttcgacaactcgaactacacgttctgatgcactcagattgatgaatgtaatacatccataaagatattctgtttttgctacatggtatcgattaagaacagtttattttgcggaggtgtggcaagacaaaggtattcaatagcattctgtgacgtatttatctaaaaaaaaatctggtttcaattcctaacccagatgaagatgtgtatgcattggcgtcacggtcagttcctggcctgctgagggaagctgcgtggggctgcgggcggaaggttccctgccccaagcccgtgagagggaggacgggaagggcctcggccgggcagtctgcaacaccagcctctcagctgcgccagccctaatgcttccaaccaggctccaagcggaaggcacgaaagcgaactgggtttaaatggatttaaaaggtgagactgggtctaacgaggccctcccaaggcctctggggagggactgcctgcaccaccgcacagtctcactttattcaaccccagcagtgagctaggggtcaactcctgggacggaaggaggtgtctggcattcgccagatgcttgaggtcagccctctctccattcttggaatagtgttctaagcaaaggtcaccagcatttcagtgagatgtctagtgactggctgaaggcgctcagcaagtaaacgacagggctgggaccagggtccaggtctgcccttgcctctgctgacagagaacataaccttagacactctacttggtgggtgccttctcctagggggacacgcagctttaccctccagtcctcagtggagaatgccagcaggcagatggccctccctggggataggggaggtgctgagccccgcatccagcaggaggcctgtggctataaatttcacttataaagaggctgaggtaaagcctccacgagacaggatttggatcatcactatagcaaacttcagtcttatcactcggcaaaccaccttttctctcgccaaactaaaaatcacaaattcctcttaaaagcctctttccttagatttaataagggtacagactttcggttacatgtggagcaggttctgggggcctagtattcagcatgggcaatgacggatgtactaattaacttgactgggacagtcatttttttttttttttttttttttgagatggagtctcaccctgttgcccagactggagtgtggtatcaccatctcggttcactgcaacctccacctcccaggttcaagcaattctcgtgcctcagcctcctgagtagctgggattacaggcacctgccaccacgcccagctaatttttatatttttagtggagacggagtttcaccatgttggcctggctggtctcaaactcctgacctcaagtgatccacccgccttggcctcccaaagtgctgggaatacaggcttgagccaccacactcagccatgctgacagtctttacgtaatgtgtacccacatccggtcatcaagacgtacacccggaacatagacaatctttgtcaatgaaatacttttaaaaatagataactaaagatattatttattggtacagtgagcatttctcattgtggacttaatgaaaatgcttttgtaatattgggagaatggaggtgattttttcagagcaaatgtcccagctactctcagcctcccttctttcattcattcattcgacaaacattcattgagcacctactatgtgtgaaatgctagagataccgtagtcaactaaaagtggaggcttccacccactagaacatcggtgtcttggagcagatgggatagcgccagggggtaagggctcatgtgacggggcgggcagcatggggaagcggatggtcagggaacacttcccgggttgtaaaactggcagtctgtgcaccagctcaacttcagtcactccctaccactgtcatgatgcgtcacctagccagacgccatctgtatgattaatgaatgtattctttgaattgaatcaatatttaacgttacttttaaagaaaatatctcaactgtaaatggaaaataagtatcacttattttatgttatattattatattattaacaatatatattaacaattaatatattgttatattattatgttatgaatacaacataaaacaatgctgctaaatattaacgctttttaaattttaatagaaacagacctgtttgctctgttaaaaaacaaaacaagcaggaaaacgtgttaatagcatgcttggccaaacagacttcctctgcagtctcatcagaaggagtgggaggccctcggaagtgcagagctgtgtttctgccgctgtgtttctactcttctctagaaaagtcatctcttgtagcaggtgtggtcatccagagctgggcgtcagcactggtggccaccagccacgtgtggctgtttacatgtaaactaattagaatgtaaactaatctggaactaattttatagaagtaaaaattcagggcctcagtcacactcagccccaggtggccacatgtcaagggctctggggccacctggggctgtggctgccataagacagcgctgaatgccgatctcaaaaaccagtgggggtatgggtccttcacccagagaacaagtgctccagcctttcctccgggtttgtaatctgagcagattgcagggaaggtgatgattcactcctggataggtgaggagaacgtggcacatggggaaaggcgtggaaacaggtcttcttcaggcctcggttcaatctaattccagctctgttaggagaccatctgcgtaatcatggacaaaaattctcaattctgtgggcctcagtttccctgtatacataaaataagagcttacgtttactgagcacttactacttgccagttgtgttttgcgtgtcatgtaatacacagaaagcctcataaaacctgtgctatcgtggcaggtgttgctggctcgacatttgctatggactaagttgtatttccccaccccaccctattcagaagttgaaaccttaacccccagtgtgactttatttggagatgagctatttaaagaagtgattaagattaaatgacatcatgatggtagggtcctaatccaataggactattttccttataaaaagaggacaagatactagggatgtacagagaaaaggccacgtgaggactcagggagaaggcaccatctgcaggcctcggggaggcctcaggggaaagaaaccagccctgctggtgcctcggccctggacttccagcccccagcactgtgagaaacagacttctgttgtttgagccacctgatctatggtattctgtgacggcagccccagcagacgagtacaacagtcaacagaaatcctatctccagaactcacccagggcccagcaccaagaaaaggaatcatctgtgacccaagagaccaaaacagatacctctttctcaactgagatggcccctaaggttagggaaataaaaggtacctggggccgaggggtcaaggcctggctggcatggctgctctgtaaattcctacgctgcaagaaaacccacactcttgctaaactccagaacaacaggcgctatgggactcctcctaactctcatttacaacccagaccacgcaactccaactgggcagaggaccggccttacacacactcttttctgataagcgactgtagacattaagccggtttcagcttaaagaggcttaagcccattttagcttaggctttgagtcgtggggtttaccttttggtggaaagagccaattccacctcattctaacactaaaacccgccccatgtgcggtgcacacagaggatgctacagatatgtctactcactgcatgtgcgtgtgactcctctcggatggatgcacagcctttccccaacctgaatgcatatggttctgtgtaatgtggaccctgtgaggcataaaaatcaccctgcccttccctcttcagagagagcaccctcagcacatgccagagcctctctcttcctggtctgcaaactgatgtcaccaataaagctctcctttctacctctgagccttcctggtgggctttcggatgacacatcactgataagccattcattggaagccagttcctgcctgggtggtggccatgtgacctcagtctgctcagcgagatgtcatagaaagtctgactggaaggaagtctggcttccgtccatcccttttttccttcttggggtgttctcataggacggtgtgattattggagctatggcagccactttgtaaccacgagagaaaggccaagagaatggacgagacagaactcagacccctgacacactgagagccaaaaatccacctcgcagcctctactgcagactccctgtgatgtggggtaattaaacgactttgttgtcttagccgtgattagttgggcattccgtttctgaacgatttggatcttccagatgaagaacgtcatggccggaggagtcgggggacttgttcacctgtggtctgtaaccagccgggacataaacccaggcctgagagatgccagtccccctctccgggtatggggctgttttgctgtgggagtgggttcagaggatactgtgtgatctgataactgcagcgtcttcgagctcccactatttagcattccccaggccctcggttatttccagtccctcctgttgtccaagttttgttctttacagcatctgagggcatttccattagaatatgcacgatcggaaattagacagaaaccccaaactggctgaatgtcttcctcatgagcccagctctgccgttttgctgttctgaaggacgaacactgactgtgttatttttggctcccatgatgcctccctagcacacagatggccaacaaacatctgcccagttaacggaggtgaatgagcgaatggcaggttctgcctgaactgagcctaaccctacccggacctgcaaaaccacccctatgaccgaataccaggatggtgcagcgggggagggtggaagccctgcacttcgactttttcaattatccccaatgagggtatgtgacaggcattaaatataaacttcagaaacctagcacgacttaggaccccagctgggcgtctccatctctctcagggacccaagggtagcggggaaagtgcccatgtctcttgatctccacggggcccgctccgagcccgcgcccaccaggaggatggtgtggggcccggcccgctctcacctgcttgccaagttcagagcctttcaggaagtcgtccaccgaggcgcccctcctcttgaagtctggagagtcataggcgtcctcctcgtctgaggcggcgtactgccccgcgctgcttctctctaggaagacgctccttttctctaacttggaaagaaaaaggaggcacacgggtgaggcagggccaccttcagctacgctcagccccacctgcattcaccaaaccttcagcccctcagagcctggccaggcaccccccacacagtgctttgggcccagctctgccgccctctcgctgccccagacccaccagaatctttttttttttttgagacagagtctcactctgtcgcccaggctggagtgcagtggcatgatcatagctcactgaaacctctgtctcccaggttcaagcaattctcctgccacagcctcccgagtagctgagactacaagcatgcaccaccatgcctggctaagttttgtatttttagtagagacagagtttcactgttggtcaggctggtctcaaactcctgagctcaggtgatctgcccacctcggcctcccaaactactgggattacaggcatgagccaccgcgtccagcctctttttaacctttgaggtaacatttggatacacagatgactcctcattccctccattggtctcctctgcccagcttttattaataatttgatcaattcacatttgtctgaaacataggacttggaagtatttgctttctctcccgccccaggcttccctgccttcacagccttcttggggacctggagcagaagtggagccgcatcccacagggcagctgctaccccgtcctgcccacggcctccccagaagcaccacctcccaagctcagggcttgggctcctgcctgtgaaccaatcagagccatggtgaattcacatattctgaagggcttcctttatagaaaggccacaaattcatgtttagtatttttattagtggccaatgtcgaacgaattagcaaatttcacagaaaatttccagtttttcaggaggtgctgaggtgctgccggggcagccccactcaggaggacggggtgggggcggaaggtagctccctgcccagtgtcaccatcgtcctttctgtcctcctagacacacctgagctgctcagcattgacctctcacagtgcgtgccccgcctcggtttccctggcccggcccccagcccagaggaacactcacaggaggacagtgtagggtcccggtgagaccccacaggctgacccagcagggccgagggtcctgaccagggctgtgctgccacctcaggtggaaacgggctcaacacaacaggagagatgagagcgggttctgggtggggatgcgggcacacgttctggctcccagccccacatctcttcccctagccctgcacggggggcattgctctgcaggtgatttctcaaaaacgcacgtcccgttgtgtgtatcatccggaacatgccctaccacaatccacatgctctctcctggacccagaaaagttcagttagcaggcatgcaaatatgtatgcaggggtctatatgtccgtatgcgtttctacacataggtacagatgtatgtatatacatgagggtgcatacagatacgtgtatctatgggtgcatgtccatatatgtatagacacatatgtgcatgtgtgtgtatatatttacatgcacacacacacagaacctaggactctgcagccagcaaaaccaggaagagcctggttcaggaaagtgggtcctggccaacttccaccgggcaactctcagaccccttgtcgcacaccaaggccatgtctggattcttctgagcctgctttctaagccaggcaagtgcctggcatttccttagttatgtggctacatattagcaaataaaaaacaccatttaactcagtcaggatcaggcacatgacagagtccaccagcaaagcggtgggctgagcgcggcccccctccctgcaagctgggatgcgggtccccctccatgggctggggagattacagggccccgtcccgtggggtttggggactgaggagccaccgaggcgggagccccagccttaccctgctgctctcggccaccctctgcgcggcctcccgggccatggccttggcgacggtggtggacaccggggtgccctgtggctgtggcaggatgcggctgggtgagggcgaccgccttccggggcccacgggcggctccagcatgtgcccatgcacagggccaggtgcacggctctgctcccaggcctcatccatcctggcgtggggacccaggtgctcgtctttggtttcggggactccagaacttgctaatggctttgattggggtgcaggtctcgggtggggggtaggaggcaccaggagctcggggggaacggcagcaactgcagagtccacggactcgccctgggcggagagggtccgcacggtcacgcccttggcctccaggctccgcagccgcacaagctccacggccgtgctgtctgccgtggggaagatgacttcagccacctgtggacaagcagagctggctcgcgggctgcccgaggtgagccccgcggtcctgcaatggggagccgaccagtcctctgcccagaggccaggtgcaaaggatcatgcccagcgacctccgactccaaccacccgccaggtatggaagctccaggaagtcttgcggggagggggcggggcaggttcacagacctcaggccccaggacccaatcagtggtagagggttccgtcaggccagtgacgtcaaccatttatctcccatcctctggacccattctgagtagatgcaggggccagagaggggagtgagtgtcaggtttattaccaccacagctggagggaagagaggggctcaggcagaggccaacgtgggcttccgactgctgggagagaacagggctgagggcctcctctgcaggggccagggcccatgctggggacttcccgcctcagagcacaggagtctgcaggaagcggctcaggcagacgcactgcctctgttcccaagtcacccctgctcctgcagggcggagctggggacggtgaggagcagctgctttcccaagccctccctgagggcagatgcttctacttcaccccaggcagggatagggggctggtgtccttggttccccacaccaggcaccagggatatacccatttcttggagtcaaggcctggtcacctgttcacgtgcagacccagcagtatcttaaggcgggacgcgccttcggccatgggtatcatcgtgctaagactcagtttgttgaaattaataaggcagtcatcaatcaagaatgttctgacactaggggtcccctctctggcccctgcatttttaatccagagcagagcagggcaggggatgagtgaggggagcgagatggggggagtgctggaagtgaggaaggggtcctggggttcacgctgatggagtcttcggggttgagggtgcctccagtgatcagggctggaagagcagaccctgcctcctccactgagcaaataccgggccggtccctgctgcgttagggcctaacaaaccctccccacccacccaacgaaaactcaccctctgccctttggcatacacgccgtagccggtaacgtttgcgccattggacagcccggtgggcgtcagcacaggtggtctccaggagacccggatggtggcgggggtcaccccagcctggacggtaacatcttgtgggggtgctgggggtcctgggaggggacagaagggaacggaggcgttcagggaccagccctggcaggtgagccgtgactgggctctgcccatctcacctggaaacgagatcattcggtaaagtcgccagggaaaaagagaagacagtgttgaaagcacatcagaaactgtggtgaggtgggagggtggggccggggtacagtcaggtaccaggatgcacagctgcccttttcctttaaattcggcatttagtcaccatcttctgggaaatgcaaacctaaactgtctgtggaaccacctccttacctgtcctcagtctctgtgacccggcagagctacctctgtccaggggtctcaggcctggccaggcagccacacgattagctcagagaggggccaacgagacgccggcgtttggcagatcgaatggaagagagatcttggcagaaggcaatcccctcatccccccgcccgcccctcatcctctcaccttttcttctctcttttctctccctctaccctctgcccggaccgcatattccccatcttaccaccccatgaaactgagcaaaactgaaagatgaagagaccaggtctgatgacatcgttgaacctgagaatccatttctgcgtgtgtgtgtatatgtgtgtatgtgtgtgtaaatgtgtatgtatgggtgtatgtgtgtaatgtgtgcatatatgtgtatatgtggatgtgtttgtgtgtagatgtatatgtatgtatgtatatgtacatgtgtatgtgtgtatgtacattgtgtgtgtatatgtgggtgtgtgtgtgggtgtgtatagatgtgtgtaagtgtatgtatgtgtgtagatgtgtgggcatgcgtatgtgtgtatgtgggtgtgtgtatgtggatgcatgtgtatgtatatatgtgtatatgggtatatgtgtatgtgggtgtgtgggtgtgggtgtgtgggtgtgtatgtatttgtgtatgtgtgtgtatgtgtgtgtgcgtgtctgtgggtgggtatgtgtgggtgtgtgtgggtctgtaggggtgtcggtgggggtgtccatgggtgtatgtgggtctgtgggggtatgtgtgtgggggtgtgtttttgtgtatgtgggtgtgtgggggtgtctgtgggtgtgtgtgggggggatgtgtttttttgtgtggggggtgtatgtgtttttgtgtacgtgggtctgtgggggtgtcggtgggggtgtttgtgggtgtgtgtatgtgggtctgtgggggtgtctgtgtgtgtgtgtatgtgggtatgtgtatgtgtatctgtctatgtgagtctgtgggggtgtctgtgtgtgtgtgtatgtgtatctgtgagtctgtgggggtgtctgtgggtgtgtgtatgtgggtatgtgtatgtgtatctgtctatgtgagtctgtgggggtgtctgtgggtgtgtgtacatgtattcatgtatgtgggtctgtagggatgtgtgtgtgtggggtgtgtgtgagtataagcacatccgtatctcccaccagctgtgttactctgaagaacaccaaccttgcaccaccatccccgggcatggctaaccctggccgtacctgcaccaccgtccccgggcatggctaaccctggccgtacctgcaccaccgtccccgggcatggctaaccctggccgtacctgcaccaccgtccccgggcatggctaaccctggccgtacctgcaccaccgtccccgggcatggctaaccctggccgtacctgcaccaccatccccgggcatggctaaccctggccatacccaagaccatggggggatgatacatggggtgtggttgaagcatgaattctgagaaatgctgacctacatgtgattgtcccaactacaccttcttcctccaacacagacacgtccctccagtttacttcccactctgagacctcattcccagtcactggggtgagcctggggacccacctctgtgctaagggcccctcctctacctgaatctctccatctcaaagttagtgtccaggggagcctctcctgaaggccccgagagaggtgcccttcacctcctgactccccacggagtgcccgtgtctggtgtttctcgttcttcacccccgcactcatcagaaggcatcgcgggaggcgtcagtgaaaagtgggtggcctcattatcccagcattcttgatcaactccgggcagttggggaggaaataaaatgtcgtcgtgtaacagatgaactgaccctgcctacgttagctgctacctggacgtgctgtccccctcaggcagcgtctgtcccacctacccctgacaccactgctctgtcaggctctagctgaccaaaggtttcatgaatatcagagcgggcagtggaggcttccggaggtgggggtgctggctgcccagtaactcagcagcactgggaccctggcgagtcggagagcaagaagacgaagaaagtgtccacactcaccccacctccctaccatctccccaggaaaggaagggggcacatcacactccctgtttgagcggagatagcagaaaagaacactggagttcacatcgcggcgaaaatagcttctgtgatgaaactgcatctcttttatacaagccacgtatgcatgcttagaggcttgtgcctgtaattccgacactttgagaggctgaggcaggcagatcacgaggtcaagagtttgagacgagcctgaccaacatggtgaaaccctgtctctactaaaaatacaaaaattagccgagcgtggcggcaggtgcctataatcccagctactcaggaggctgaggcaggagaatcgcttgaaattgggaggcagaggttgcagtgagctgagattgcaccactgcactccaaactgggtgacagagcgagactccatctcaaataataataataataataataataataataataataataataataatttacaaggacgagaaagaaggaatgattctgaaaggcacgtaagcacttccaggcagtatccaactcagtgagtatgtgtccaggggtgcatgtgacacggaagatgtaaccgtgtcccctggggggactcacttccctcctgtcttttgtaggatgagcctcttgttgatataaatgctcaaagaaaaattgccaacatggtccctaacatgttccaaggactcttgtgcacacgcacacacgttctgtgcttcgccggtgacctaagggattttccagggtcatgttgtcaggatggggattcctgcttctgcctgccccaccttccctccccactagcagggtgacatcctggcgttctctccctgggggacccacggaaggacacagggctcacctgcaggcaacgtggagaactccacaaaggcctccttcttctccctttgctccagcgggagctgccacggcatctggtggggtttggccagaaccttcaccttataggccatgttgggcctgagattgaagaactggtacttgtacctggcggccttgacgatgtcgaactcctcctcgttgaggaagatgacgtggctgtagttgctgttggtgggtagccaggagagctgggcggagatctgcgtgatgttgtccacccgcaggtgggagggggccaccaccacgtccttgcccaccagcagcgtgcactgcagctcatccgagctgcccctgctggtgacgcactgcacggagatgcggtaggtgcaggctgccatgttgagcttctcgatgagggctttagttctgctccccagcgtgaggttcatgcgtgtctccttgtccaccaggacgttgtagctgctcaccgttccccatcctggtggcaccgccgggggctcccagcccacaataacacttttggcgagttgtttgatgagggtgatttttctagggtaaggcacgatgtcttctccgatgtcgtcgatgttcacgtccagggtcccggcactgttgtcggtgatgcccgcatctatgtgggttggggagtggaggtccaggatgtgctctccctccaggccgatgccggaatggttgatgaagttctgatcctgctcgttccccagcgtgcttgccaaccgcgactcgttgtcctgcacaaagtccacgaagttggagggcaccagacccctctggccatcgaggagctctcctgttgggtacaaggacagagttatcacccagccaacacagcaggggcctcgaggcccccagtgtactcccacctcccccaccaggaccataaggcagagcaacagggttgccctggggctcctccgctgttcccaggagtccatgctggggccagctccacacccaccatctaaagagccagctcctccatccccgtggcccagtcttcttttctccatgatacttatcgcaacctgaaaccatcatgtttgtgtatccgtgtacgtacactgactaccccctcccaacacgaacaacactcagggacagcagggaccacacgactattgaatgcccagccctagagtgacagctggcccacaacagtgcacaggaaagatttgttagaaggacgagtcagtcaaatcagtggcttttggagattaagaaaataaacatcttactatgatttttgattaagaattaaaaggtgatttcctggcccccttgaaaagcactgggcacatcttaatgaatgcacaatgtgtccaatttgatgtgaaacaaaactatcaatttggtgtcagaaccacaagttgtgtggcaaaaaaaaaaaaaaaagtcaaagtagctcttgtggttaagagtggacatagtggggaccgctgtattttgtgaaagtctaacttctacgtgctttcttcattagtagggctcacaaggctgctaacagcagacggccagaaaacggagaagtgttcagagcttcaaagatgaggcagtttgggtaatcttccagcacagacccagaatggaccgtttccaccaattcatcacaaggtacccacagacccacagagaggggctgggaaatgctgagcattggattctgcgcccagaagaccccctgcctcaggggagcatgtgatgtgttgtggcccaggggaagacatgtcaaccatttagttagtcctggatgctaataaaataaataagaaggacttggattccgttccaaacctccacctagggtgtgggtctgcaggagccaatcctttgcactgaggatatgctatttaaaaatccttagtttggcataggaggagatggaggtgatggtgatgatggtgacggtgatgatgatgatggtggtgatggttatgaagatgattataatgctggtggtgatggtgatagctactatttattgaacaattactatgtgctaagctctatccgaagaccgtcgtatctattatctcatttctcctcagaccctctatgaggtgggtactattactatctccattctatagcagaggaagctgaggcacagcgaggtgaaggaagtttcctgctgtcacacagacaatggagccctgagttttgatccctgcctgcaaagaggctcctggaatgcttctgtgggctccatgtgtggtgagaaagttccagagatttcaacacaggttttctggcagctgccttgggcacatatttctgtgcttatgtgaaaatcagtggtgataatgtggacttatgggaagaattcaaactgctttgctaccaactgtggtgagagttcttggctggaccatccagagccaagaacagctggtgagagagtggtgagcgagtggtgagtgaggcagctcgactgctgggctcctgctcatggacacctctagaagtgacccgacctcaccccaagtaaacacccaggaaaagcacctggggcttccatcagctccgagaaaacagcatgaggtcacgaaagagaaacctgctagcttagcaagcaagattccttctgctcagggggaagaggaagaaaccaagaccacgctatttgtccagggcagttgaaacatgtagggaattagggaatcaaatcctttagaacgttgatttatgggctgctggtgctgttacatgtttattctcaagctaaaaaggcaacaaaaggtggggcctttcagatgatttcaaatttggagaggagacctcgagggaatgagcaggggcaacctggggccaccccctaagttgacaacagtgccttgaagtcaaggagatggatggccttccacaggtgccaagagccaccttcccgtgaggtcacctggagcagaacaaggctctgccagagagggtgcctctgggagaccctgagggtgctgaaagacaagagcaggagagacacttttggaagcagagggtctgtcagtcccatgtgtctgcaaatagctgccaaaagctctgcagaggttagcggaaaacatctaccatgtgtcagaggtcagcttagagctgaatactggaaaccccactcaggtttctttccagtcgtcaaagagggcaaacctggtaactacggagtggggaagggtcagagaggagggctgggtggccaggagtatgttgggagccctgcctatctatcaggcccctggaagaggtggtctgcggggtggactggcccagcctacgtccgccacagccatgttccaacagagaccttcatagaacccatcctcatccatgtctccatagacgtagaggtattttcccgccgtgaggggcagctcagcttcggggttctcgttcggtccatcgaaggggttgtaactgcagagaaaacacagttccttcattagaggctctggaggacacagcccgcacccctgtccgtgcagaacgccagacgggcacatggcttctctcccactcctagggaattacaaacccacataatcgttcggggctgatgagttctctgtacactggaaattcaagccactgccagctcacacacacagatttaaagtaaaaatgcaattcggaaatgaagttatatgctcagaactatttgcatcagataacaggtttatgattctgacattctattcacacttatctcttctgctgtaactatacatctccaaattagcaagcagatgtgaagaaaattaaccctataatctttcaataatacaatttagtgaaaacagaatcatatatactatttagcaacctgcttattcttccaccttgcaagatagcatcctatacttctacctcttgaaatattatcatcatagtctttttaatgggtgtagagtattccactgaacatattaacatactttatttaaccagtttcctaatgttgggcagtgaggtttcttctaacttttggctaatataattagtattgcattatatattcttataaacatatttttgcacacttccacaatttcttcctaatgataaatcctaggaaatatacttatttggtcaaaggcacctacatttttaaggtcttgggtgtggacagtcaaaatgctcagaaaaacagacgcatgattttatgctccccccccccacacccccaggaatataagagtatccatattctccagtcctcaacatattgggattaataattttcaaagccgtgtccaacttggaaaatcaaacacatgaaacaaacccagatgaattggggattctctaaataaaaggcaaattaacttaaaataacagcgaagaactcattaaaaaatgaaaataacattagagttggagaagatagccagacactgtaatattataattatgatatgaaaatgattcatgcatcagtggcactgtgcagtttaccaacactttcatacacgttttattcgatggccattaaatgttaggaaaacagagaagataaggtccccagtctcaatggctgagtgaggtcaggcaacatgcccaaagtcacaagcttatgaatcggtggaaggggaaccagagctgagacctcctgacccgtcctgcgcagttttaaccacaccaggtcacgtggcccctcatggtcagggtgcagaggtccaggaacccaatccaagaccctgacagcacccagcaggtcagcctagagggctgtgcaccaggaactgacatgggccaccctctaacacaaagctcggcagtggaacgggacaagagctctggaagaaggaatagcatgcgccaaggcccagaggcagggaggagagagatgaggttggcagggaccagactggttttaacctgatctcacaagctgtgggatgtcatgaaagagttttaagccagggagcgacaggatcatgtttgcgttttacaaagagacctcgtgggtgctgtgtggatggagcttggtggaggagttccagcaaaggagtttggtcggggagtgacttaggaggctgtggaaatgcgggttgcctggctgcagggatgagggactgaggtgcaggaggaccctcggctttctggcctcagggtgagcaggcggggacacaagtcactgagtgggggttttcagggggatctgcaggggggtctggatgggtagatggccgagacacagaagctggcagagtgttctcggaggaggaggaggaggaggagggagcgagaggaacaggagcccccaggccacgccttcaggagtgcccacacctgacgctcaggaagagaagcttccccagggagcaggtagggaagacacaccctgagagcttgagagggaagccgcggaggccaagagggaaggtgaacaccgagaagggtggaagaaggtccctggctggtaagggcacggagaagaagtgggagatcctacggctgtcgtgacaacctcgtcggtgctcctgcgtgtgggccctggaggccacccgacctcgtgggtgttcagggcagacgctgccacgtactgtgtggatgagaccaggggacacgtcgggaatggggactcaacagagacagaagtaggtcaggggtcacgcagcgctggaggcgggggaggagggacaggtgatcactgatgggaatgggttcttgaggggcgatgggagacgagggacaggtgatcactgatgggaatgggttcttgaggggcgatgggagacccccacatgtggccgtggcatctgtgagcacagcagtggccctgggcggcacactgcaagtgggtgaactgtgcagtgaggaccatctctccgtacagctggcgaaaggaaggatggtgatgaatgtgtcagcctcaccctggacctcgggtgggaaggacccaggagccctcagcaaggcgttccccacggcggaggctgcaccagatggaagggaggagacatggacacagaggcagcccctgcatggagggcggggagaggccgctcggcacccagagtgagcgcccaggtgagcaagaggctttcggtttgcagaaatgtctaagcaggttgctgaataatgacagcaagaggagacactgattagacccggggcagaaaacataaccccctccctacatctacctgcaaagccacctcttaggggctctgagggctttcagaaaactcagaaacagctctctcggggaccagcactatatgcccctcacaatttgacttggtttgagagagggtgggtggttaaaaaaaaaaaaaaggcataaatccatcaccagtaaaataggaataccactgaaagagtgagataaggagaatgtgcgtgggctgtgactggtgatggccacgggagaggcagatgtgctggctcgtcacgcccccgcttctggagccacaccagccgtgggtcagtcctcgggggacattagctctagggcagctccccccagaaaagccatgccctctccatagaagtggcaggaacgcaaacccagtggccctctgaggttggccatcgtaggtcgcatgtggcagcctcgctggaccaggctcatgattgggaaggaaggcgtctgtggcacaccaggcccctgcttggctgggaagccacctcagcatgtgccaggctcagaggacaccagcccagcgctgcccctgtgctggcattgagggttctgtgaatggctgcgcctgggcctgctccacacacagcaagaaccggactgaaggagccaggggtaggactgggtcttcatcctggccccgccaactgtggccctgtgcgtctgcatgcaatagcctctcagcgctgtgatgctgtcctccagcatggtgacagatgagcggatggtgggcctgcccccacctgggtgcagccagcattcacatctgcctgggctggattctaatgggagcccacagcccaggggcatctaccccagtgcttctgctacctgaacctcagaaatgggtttgctttggtggaactggtgtattaccaacgagcggaatgtgatccgctgatcctcttaatggtgttagaaacagctcttgctggagaaagcaaaaggtattcaaggtgtatggactggcttaaatcaagagtcacctcctttgcatgaacagagtttaaggatctagtgagggtggcaactgcactgaagcttggtccctaaacagatcacgggactctggctgcccgatgccagctgaagggcagggatatctgcctttgaaatactgtcaggtcagcctcaggccaagcccacgctcagagctgttggagcatctgtgagacaaaaggctgggtcttcacgagtgctaagaaatgggggtgaactgctctgtcttgggcctgctgcccctggctgatgaattcccaagtgtccgcccatgggcagagttggctgcagcttgctttccttacgatcaggtagtgcagtcctgggggacctctcatccttgcccacgtccgcctctgcggaagctcccgtggaggacctgagaggtgtgcgggacaaaactggctcattacctctcagcgagcacaaacactgaaggcccctgcacgggaagcccactcagcggctgtcatcgcagcgagatgcagcctgcagcgcccagcagagggtgaggatgcgggagatcagggtgctggacacaccccctttcactctcggtggtggggatcggggctctggacatgtcccctttcactctcggtggcgggatgtcccctggaaagacgcactcatggaccaacccctgcacctgtgaatgggaccttatttggaaacagtctttgcaaatgtgatggagttagtcatactgcagcggggcagattccaatccagggaagggtatccttaaaggaagaggggagaacgcacaaagacagggagggcgaggcggccaggcaggatggaggatggaggcagagactggagccacgcagctacaagccagggccgcctggtctcccggcagccagaagaggaaagaaggacccctccttggagccctcggagggcgagaccctgccgatacccccatctcaaacttctgcctccagggttgggagaggagaaacctgtagtttcaggccaccaggtttgtgacctcctgtcatggcagccctgggagacttgcgtgccacccaaactctctccaccgaaccctgctcagcctccaggccaggctgaaatcccaccttctcctcgtgccctgggagaagggaacttctcagaccccagagtgttcccagacccaacatctcatctgccccactcacaggggctcggtggacgccgaggggccgcacttacctatagcgggcaacacagaggtggaccttccccgagtatctctgcttggaggtattggaattccgttcattctccatctgtgaaaaaggcaatgggtgtgtgggttattgaagctggaggtgtcccaccccattcccgcggcacacgggaaagcccctcgcagcttcctgggccccaggagggacggcctgagactgtggcactcccaggaggcactgccacccgcacacccacatgcgagcttggaaaggagggtggtccctcggtgtggaccccttattacataggccccctctgtgtttgtagagaacccagtccccaaacaggaaggtaaggctcaaagactccgcccagtgtctcctacagcaatcccgggagtcagcggcgtggccttttctcataggggtgggggtaaaattaagcagtatgtgcacgaccccccagtgatcccactctcactccccctagtgcattccccacacaagctggaacagtctttaagcaggaattagaccacatcaccccctgccttaacagctttcagtggcttcacctcggactcagacaaaaagccaaacgctgtcctctgcccccgccccctctccagccacaccagccccttcccatcaatgccacaggacaggacgcgcagggccctccccaacctccacaggcccctcccggccagctctgcgtcaacagccttgctgcgtcatccttgcacccctcgatgggatttgcttttctaaacgctgcctcgccagtgttctctctgctcccccttagaacagggacctcacctgtgttcacagaggggcccccccacattccagcacatagtagggcaagggaattaacaggggcaaagggaagaaccaaccagaaggaagacagggaggaagatggggaagaaaaaacaggacaaactggccaacgtccacaccagacacacacagcacaggcagccccggcagcccctgcgggacgggactcacgtctgactcagatctgcatcttgcgctaccggatctcgacaggaaggtgggcttggcggacagaggctccggcctgtcaccaggctgcggaaggggccggatatattcaccgatcgcagagctgcctccaatagcgctctcctgacctggccacgaacattaaaacaagttgaaacaaatatgcgaataacatcgtcaaagcacgttggtcatgcgcctacccggggtgcctttcccctctttgacaacagccactgattttcattttggggtccacccgtctcctgctcgccatctatgtaggctggcggcgcgaccccaccctcagctctgggcccgtccagctggcagagccaccctggcggtaacgctgtttgggggctcaggacgaggatggtcccaggcagagggaactaaaggagagttgatggcaaacaggctgctcctttccttggcttaaaattgagcagctgtgaagctcagggaggccgcaaacctcctgcacctgcgagaggaacgctcacgtgaggacggcgcctgctcacagcgagaccgagagaaagtggatcccggcgatgggcttggagcccctggttcaagatgtccctgaagccacgtcctggctcttcatctactcaggtgacagacagactcctttttgctcacaccagtttaggttggctttgctgtcacttatgaccctgagtcctaactggccaaaggggtgggtttgtggctaaaaaaatactcttgacgagagatttgcaagggctgaaatagttcttatcccgtcctatcctcctggggtctcaggggctgctgagccctgtcctggttgcctggaagggagcattgagcaacgtgactaacgctggcctgggtgtcagacgacagcgcagcactttaaccaggatccgggtgtgaaacatgacgcggctgcttccttcccaagctctccgctgctgggaatgatgacaccccctccctggggtcctcggtccctctgtagctgtcacatcatgacagtcacctcactgatgaatatgaattgctgagtccaaatcagtaagtataaaatgatttaaaaaaccatgaggaatgttccacaacggctgccctaggagccgcccctagcaggccccacaactccaggctggagtgaacagcaggacagcgccaccatggcagggaattggagctggggcagccctgccctggggtcccctgtgagaacatctgatcctggagggcaggaccttgttgtattcactataacatggctcggcgtgtagcaggtgcaaagtgaatatcgaacgattcagcttccagaagcctcggaaacccagccgacagcagagcctgctgcaggctactccccttccaactggcattgctgcctcttctctgctcccagccacgagagtcacctgggccagtgaaccttgaggggagtggcaggctccacttgtgggcaaaagccacttttcctccccacacagtggccagggaactttccagagaggaaacactgtcctccagcgttccgagacctggggggccgcgtgtgactgcagcagaacttggcccttcctgcctgacaccgcgccacagtgaacagcaggggacggcacagctgatgaaggtgatatgaatacagtagtcaccttgtattcacaatttatccaaacccaactctctagggaaaaataacgtaatccccgtggcagcttttacctgccattgtgcctgagaagacaaggtgagattagaaacaaaacgtgcagtgccttcaaatggggctggttcccacgggcccctcgagatgcaaacaccgcgctctctcatgatggtaatgcttcaaaatacgtatgttctagaaaaatataggtcaaaaaaatgttgactcaaaaaacccagctcccatactggaaggaaaactggctgcgccagggataggagaggccacgcctctccccaacacactccttcctaggaggttgccggggacagtgtggcccatgagcaacgcctgccctcacatactgactgcagcgcctcactctgtgtcagaggtgcctccccatacagggcgcgagtccctttgtggcctgccccagccacaggctggaggagccctgggtgaaagtgcaggtgagtgacagcacatccacccgggaccccttctctgtcttgcggccagccctgcaccttccaccatcctctctctcaggtcagtgtgggaagatctgcggcagatgaacaggtaaaaaatacagatttgaacacaatgggatgttatccggcctcaggaaaggaggacacctggccctttgtgacaacacgatgcacctggaggactctctgctacgtggagtaacccaggcacagagatacaaacatggcacggacggcccccactcacgtgggaaacctcaacaaggccaactcgcagaagcagagaacagaacagtggtttccaggggccgggccgggggctgttgatcgaagggcacaagatgaatactctttggggatctcctacacataaacgtgaatgcagctgaaatgctgggttgtaggccaaggcggtggctcacacctgtaatcccagcactttgggagaccgaggcaggtagatcacctgagttcaggagtttaagaccagcctgaacaacatggtgaaaccccatctctactaaaaatacaaaaattagccaggcgcggcggtgcacacctgtaatcccagctacctgggaggctgaggcaggagaatcgcttgaacctgggaggcggggcttgtactgagccgagatcacaccattgcactccagcctgggcgacagagcgagactccaatgcaaaaaacaaaacacaaaaaacaaaatgctggattatagacttgaagtttacaaaggaggcagatcttaagggttttcaccatgaaaagaaaaggtaaccacgtgaggatgtggataggaggtggtatgttaattagcttggctgtggtgattatttcacaattgatttatgttacatcggatcaagttgtataccttaaatatgtatgatttctaattatccactatacctcaaagttggaaaaaatgtacaaaaataagtaaacacattcagagagtgggggaagaaagaataaaacaagaggagaccctaagcagaggcctggaagaggggcctgcgctgtctgcagggaggagtgtcctggtgggatcggggtgctgtggggcagctctctggaggcactggtgtccaccgccgtcataagcgacatgcactgtgaggggagtgccagggcaatgccaggggatatgggcatgggccatgccaggcgacccctggtgggtgaggaaactgtgattaaatgaactggattcattaggagggtgcgtcttccagacagttgttaaacagaagccgtggtgcaaaccttcttctctgccaggcggccctggcttagtaaaggcatggtaccactttgtttttttggttttatgcagtgtgcattttccacagtggttaatcagattcctttttccatgctggccaatccctgttcccgcctccctgtcccgggagctttgcagcgggttccacattcacatgctgtgggcctcggactcaccgggcaggcctgggactgctgtttacagaagggccagcttgcaaggtgggtcactggctagtgtctggaactcagcttctgaaatgtcccctacactggatggaaacatcccctgactgataaaggcaggcctagcttgtgcacaccacacagctcacactgaacacctgctttccttccaggagtctggagcttcggtgggcacggtgcccgcgcaagcagcccccaggaaaagctctggacccaagtctcagtgggtttcccagagcagaagccgtgcgtttcttgtcgcacggagtggggctctgtgtggcccttcacgggagggagagagacagcatggagacacgtgcattctgttttcccctgggaagaacggaaaccgtcttgttttcctccactcttcaggtgtcacagctcaaatgtggtttcttggcagccgccttccaggaccatctagaagagcccaagtcactgtccacctcatcacctggtcttcatgcagcgtctggatcagaggctccccacgtatcgtctgcccgccagcgggagctccgcacggtgccctgtctgtctctcagcgttgcaacctaggcagggcatgcagcctgggtgtcgtgagtgcctggagatgagcggcagagcgctcggaccctggtccctgcctgctggcctcccacagccacgaccacttaccccacccggcattctctctgatgcgtggaccaaaagggaagggcatgggaaggcgtgggacgagcggagaggcaggagaatgttttttagcaagacacaagtggcatctccttattttaatgataaaaagcacccaaggtacttatatattctgataagaactaggggaaatttgcaaattatcttttttacagaattccaaagtgaggttcagacgctcatctcccctaatttttttttaaaccaacttcttaaacaggtgggcagacctggccatgaaacctgtctaacctctgcatcccacttaaccttcagccaggacgtagcacctccaccgaggtctgattaaaggacatctgtgatcgctctgcctgcgaccaagactaaatcccccagcacacacacagggggcttctccccacccggcctctaagcaggactgtgatgggcgagggctcatgttcaccactgcctttgctagaacagaggttccaagcacgtcccaacatcaccaacaagttactgagatgagaaggaaggaaaaacaacgaacacagagaaatgagcttcacagagctttggagtacccagccaagaaatccttgtggagtcgttgccagtgcagactctgcagccagactcctgggttcaaatcccagactgagcctccatcagcatctgtgtgacccacactagtgctttggtttttctcgcctgtaaaatgggcccattttacaggtgagaaaatgtgtgggtcccacatttgtggatgcccgtgaggtgctgagtgtaccgtgtgccccacggctgtgagcagccctgttctcatccttcccattgcagtggcgggtccctgtaccctctgccaggtgtcaccaaaccgatttcacctgtgcacaccctcgcaggcagccaacggccattctctccccaccacagccaaggcggaaggtccaggcgcttacctttgccgagggaggtggctaggccattcatgaactgtgggaaaggcttgctgggggccgtggagatgtccaggggggccaccgcgctgccacccagcaggtcaatcttgccagcgtgctgccggaacttctccaggtcccgggacagcaggttgaactgctcactttgagtccggcatttctcttccagctctcgaaccttggactgcacggcagaagcaggacagggggtcagcggtggcatttggtggtggaaatgtgtgtgcgcctgttcacatgtgttgtacgtgtgcacatgtgcactgtgtgcacgtgtgtacacacgtgttgtgtctgtgaaaatgcatgtgtggttgagtgtgtgcatatgagcatgtatcctgtgtgcacgtgtctgtgtgtgacatgtgcagcaggggccgcctcccactttcacgggagagcagtgcctgataaacccagcttctcctgccacctggctactggccaatgtgagaaaccacaggtgccaagaaatcctgcaaacactcagctcccagccaaccgtagattgttctgggctgtgcgtgcagcccgggcactttgcagttggcaggctttgctagagctgtttggaacttggagtatgaggctgtgatgcggcccagactcaggggagcagctcaggtgctgtcccatggatgcaaggatgcaattcttctcatccagggcgcccgccccctcggactgtagaacccttaagagcaccacttggagcaataaggactctctatctgctatgttcagttagcaacactgctgcatttgcagacaacacgaagccacgtcgggagccctggggaaggcaagcgtctcccccagggacacgcacaggaaaggggtagcccagcaaactccttcctcgggtcaggacaggcctgggctgtgtccagtctcgggacatctctgacccttgtgggcttcctcccaggtcagaggtgcatgggcaaagccccgctccctgctcccctgggacttgagctctacataagacatggcctcctgacataggtttctggcacccatcacagaaggtgcaggacagaggggtctacagaggacccactctaccttctcaccccgcgttcctttctccactgtgctgaccgccccccggcactgcagtagctcctgggctattcgtttcttgtcggtgtccacggctacactctcggccccaagcctctgctttctggctcaaggacacaccttcgatactctgcatggactcagcacccagcaggtgctcaaagagcgtttgctgaatcagtgaaaaaggcgagccctgagctgtgggcaccgtgctcctcgtggggatggcttgtcaggtctgcatgcaaagccgctttcttgccactccttactttaggatggccgggaacatcccatttatggggttattcatgtcatctgtggggctgacgacactgacgtttcccccagtgaaatgtcagccccatgagggcagggctttgtctgcctgtttcctgctgcgtcccggacctgagcaaagggctcagcaacagccccccacctccccctcccctcctccgcccctcctcttcatccatcctctcccccactatccctccacaggcagcaggcttctcagctccttagtccagaatgaagcactatttatggctgagatcatggatttctaaaataaacctaacaaatccaaagcctataattaatttctttgattcattaaaagaaatcagcagtattcttctttaaaaagctgaatgggcttggccaagccggctgtgtctaccaagataggcatagagctaaaaacccaggggctctggggcctgacatggaaagcatcggagggaacccaagcccagggacagctccgaccccaaatgtggggtctgcaggtgggatgacgacttggcttcgcagggcttgcaggggctctgactctgctggttcagcccttaagacagagtgacgggccctgcagggcagccagggtcctggccagggaacagctgccactgcccgctgcaggcaaggccggaccccggaaggccctgagctcaactgtgtgagccaacgaacccccaggcacccatggggcactcgcggagccttcccagggtgtggagaaacaggagacatttaatagtcatgcattcattctaacatgtgacagggaacatgtaactggcacacccattccctaatgtcgtgtctatgaaaatgacctaactaaaataggccaggcacggtggctcacgcctgcaatcccagcactttgagaggccgaggtgggcggatcacctgagctcaggagttcgagaccagcctggccaacatggtgaaactcagtctctactaaaaatacaaaattagccgggcagggagacacgcgcctgtagtcccagctatttgggaggctgaggcaggagaatcacttgaacccgggaggcagaggttgtagtgagctgagatcgagcctctgcactccagcctgggcaacaagagtgacactctgtctcaaaaaaaaaaaaaaacaaaaaaaaagtgaatagacttttcatacaaaaatcttgaaatgataaaattatagcaataaagaacagatcagcggttgtcagggttttgggttaggggagggtgtgacgagggacggtgccatgagggagtttctctgggtgacagagccgtctgtacagctgatggtggtggtggtggtggttacgagaatctgtatataccaccaaatgccatacagctatatacgaaaaaaaaaaaagagtggatataaacactcgagaaagcaagtaaattccccagcatgctacagtgctgctcccacgccagcttcccggctttgagaacacactctggctacagagacaccaccaccgggaagcaggaagaggggccacgggaactccccctgctgtctttgtaaattcccgtgaccctaaaattacttcaaaataaagttttcagaaatgaagagattttaaacaataggaactaagaatacaggtggcatacagagatggtgaagataatgaaaggtaccaccccatcaagggggctaagggcggctgaggtcacaggagcctaaagcgggttctgcatctgatacacacctgccagcagcctgcaggctgcgggctgcctgcttttgtttgcaggaggacaggtcgtcgcaatacagagggaacagggcaggctgtctgctctcacatggttccatgggactcccagaaatgacggggggtggggggccaaggacgagggtgagccgagcagcagctgcatactctctgtggtttggtccccagggcctggcagggccactcccacgcctgtgtcctatgggggccatagtggcgcttcccaaggtcagccccttgccctggcccatcagtccatcctcaaccgttagttcacgacttggcacagggtggacatttaacagatatttgatggatcacaataagctgcgggtaaactaatctacgcacaggaactgtggagtacccttcagttagagatgaaccaggtcacctctgtccaagggagacagaaaacgggtggagaagcagccaccaggtggctcaccaaggaaccctgagacccctgcacaggggccgctgtgtcatcacaggcctgggtgttcatcagggccgggttccctctcccacggggaaccctcagctctaggtatcctgtgagtctgtgctccaggccccactctgtgcacagaggacgcaggcccctcggtaggctggaagtgccgtcagcagcagcaaagcggcgctcgcaggagcagccgtaatcatggtggcagtattggtattgatgagcagtactagtatcagtagtactggtattttcatcacctgcagtagtagaagtcttgctttggtattagagcattaacagcagtggtagcaatagcagtgttttttgtaggaatagcattggtatgagtagtggtatagtaacagtgctgttggtattagtattaatagcagcctagtattagcagcagcagcagcagcaatattggtattatttgtactagtagcaacagtatcattattactacctgcaagcgtactggcgttatccttcacagtcacagtttggtgttagtattagtagcagcagcagatgcaatattagcagcagcaacagcagggatattggtgttcttagagtggcagccagccactgtccttgcttcccccgcagattccccagggcctggcgccggggacatccaccgcgttctgagggggtgtcgggagcaggaggcccacgggcagcagtgacgggggagagccagctcgccttgagccccgtcccacagtcccctcacccaactgggctcactgcacaggagattccatgccctcctgtgacacaaagtcactcccttcttgaagcctgagaaacgcccccaggctcccagctgtcacctcctcccggagggtgtttctcctccaaggggccaccagatagggccagtggttcgccatccacaagggacccatccgcacgacccagctacttcctgccaggctccacccgtgacactaggggtcacatttccacatgagatgtggatgggaggatgccctagccacactgccctgcttctctcgaggcggctgcagagagcctggcccaggggttgtagggacgctggctctgcccagcccattcttgccaactgctccttacacctcggggggtcccggagtggacttgagtgctacagcaaatcaccgtgtggacacagtcctgcacgcagactggcaggggtgccagcaggggcaggggcagggtagacctgcaggaactcaggatggggtggtgagcagggcaaccagctctgtccaaaggggccggtgcctcggcccgggtgcagcccaccaaagacaaagctaaagcttctggtttcccaggagcagcagggcattgtcccctccacatctcatgttgaaaagctaaagcttctggtttcccaggagcagcagggcgtcgtcccctccacatctcatgttgaaatgtgacctccagtgttggaggcggggcctggcgggaggtgtctgggtcctgggggtggatccctcatgaatagcttggcgctgtccttgccataatgagcaggctaagttcacacaaggtctgcttgttgaaaagagcctggcacctcccataccctcctgctctcagcacacgacacgcctgatccccctttgccttctgccatgattgtaagtttcccaaggcctccccagaagccagcacaccccctgtacagcctacaggaccatcagccagtgactccttcataaatcaccttcataaaccttcataaatggcccagcctcaggcattcctttatagcaagaacggcctgacacacccagggaattttcaattcaccggaagtctcacattttaaaccctgctgagtatttcaaggcccatcagcagcctgggctgacaggcatgtctagagatggctgcaggctgtggctgctggccgtggtgctgctctgcacgacagcatggtgacactcccgcatcagcaggttgggtgtgtggggggtcaggttggatcaaatgccctcatggccctgtagatgcccccggctgtacccacataagcctccgacacacaggacgatccctcacttgctcctgggcctggggggttctggaacttagaatttgtgaccctctgcatgcctacatccacctgggcattgaacacgcacttacagacaagctgggcgatgcattgccataattgaggatcccacccaggggtggccagtgcagataccaggaaggccgcgctgccgcaagcctggagacagctgccccgaggatgcctgcccggctgcgtctccaccgaggcccaaggcacgctactcggcgtgaccataagcataagggatgggagaaacgggcattcgttggttaaagtgaagatatgtcacccagctcacacatcttagcactgcctcacctttgaacgagcagggtgtggactagtgaggccctgctcctgcggtctcaggcacagtgctcagagctgggtctctagctggtcctgtgtgtggacgctgactcgaggaatctggttgccctagtccctgtgcagttgacgtgctttccccgaatgagcatcatggggccaaagcgcaagcaccctcctagcagggcagagcgctggcaccacgtggagctcacagaccaggcatggaatgtaccctctcctgcctgcttgtccaccagcacgtgctccgtaaatgcttgtctgatgggagaatctgctgtgagacttgctttccttgtaacctacaatgaaggtgtggaacaggggcacagcctcccccacctcaaattcctaccaaggagaacctaagagtcctgcccgcccacatccagcttgtttgcacctttcctttaggctcctcgcctgagcacagctccctggcgtcttggcagcagggaaggctctcgtgactgccaggggggtccctgctggggctaagagcttccaattgcctatggggaggaattgccagcagcagccgcttccaaagcatgctgagagaaaagagcaacccgtggtcctgccccaggcaggcgcatttacacctcgatatttatttccggatacagagtgctgtcctgtctgggtttgggactgggcctgggtgtcaccccggctgcagggatgcagggacacacccagccccatggtgctgctcctccccatcccgaggccacctgctcggcgctagggtctgcagggcactgctcagaagcaactgagtccggaccaggcaggaacagatggcagagtcatcaggcaagtcaactgtaattggaacaaacagcagaggctcgcaaatgtggatgtggctatttctaaagacaagggggaagcatccaaagacacccccacagctcccccagctcctggctcagtgccctcctctggcttcccggcctctgtgaagaggggtgataagcaggcgctgtgctggcggctggcatccaaacggggtggttctgagagcaaggggccagatgcataatcactccagaatcataggcagaacccagggacggtccaggctcaccgggtcacttgacttagtgtcagaggcgttcaaaccacagcgactccatcttgaataggggctgggaaagatgaggctgagacctactgggctgcgttcccagatggtgaaggcattctaagtcacaggatgagataggagctcagcacaagatacaggtctcaaagaccctgctgataaaacagggcgcagtaaaggagccaccgagacccaccaaaaccaagatggcaaagagagtgaccgctggttgtcctcacagcacattacacgctcattataatgcattggctgctaaaagacactcccctcagcgccatgacagtttacagacgccaaggcagcatcaggaagttcccctacatggcttgaaaagggtggagccctcagttccgggaactgcccaccctcccccgacaaaaactcatgaacaatctaccccttttcagcatataatcaagaaacaaccacgaatagcccacactgctgctctgcctatggagtggccatccattcgtttcttcacttctctcacatactggctttcgccttcctctacggactcacccaaattctttcttgcgcaagatccaagaaccctctcttggggtctggatcgaggctgctttccggtaacattaggaaaatttggaaacaaattgtcccatgtgctgtctttatgtgatttcattgatcactggctgaatacctactatgtgccaggccctacgtgatttcattgatcactggctgaatacctgctatgtgccaggccctctgatttcatagctcactggctgaatacctactatgtgccaggccctacgtgatttcattgatcactggctgaatacctactatgtggcaggccctgcgtgatttcattgctcactggctgaatacctactatgtgcttggccctgcctgggggagtcatgcattgctgctgactcagagagacctccccggtaagttggtgttaggccattgcaccagggcagaagacgaggccaagagggacttgcggtcacacccccagtgggcagtaggacccacccaggtctctctggcctctgagtctctctgtccagggcccacctaagcccaagcctgtgccctcactcacccacacattcccctaacacactcactggcccaggggtcacccagcctctgaacaagagccaggcagggctggttccctgcaggccgagcaggcccagcgcctgggaccacagccctttagcttcaggggcccacagacatggttccattttagtttcttttaaaatcagaaaagaagtgaaaaagggtgagacatacatcatgcatccagcctgtgtaatactcatctttattccacaatagacgcaaaacacaactgttaggattattttatggaggaagggacgacccctaaaggcaaaggccacacagcccacaatcatccactgcaggcctgaggccagacgcctgcggggaggtagacctcagcctgcctgggaagcaagcacgctggccaccccgaaagtctcccagggaggaaggggggctgttcaggaaaaatagccgggctcctctgaggccgagacgaaccagggctgacatcacctgaggttcaatgcctcgctccaggaggagacacccaaggcgctgtggagagaaggcgagggactcccatcagggtgccctgaagaaccaccacagagctgccgacacgcacacgccaagcacacagcactggcacaggctcctcatgacgttcccctgaccaggaagcccagatcctcatctcttagcccagccacatggtgacaagcacaccagcccctagacttttctcaaagcacctgagagggtgttaccaggctgacttcctgcccttggggccatgccctggcacttgggagctgtgtgtcctcgggtaagtggctcattgtctctgtgccccgattgcctaatcagcaaaatgaggtgacagagaacctcaggcagtggtttcaggggttaaatatgactgtatttctcaagagcctggggtaaagcgacttcctgcattcctgccctctgctactgctgcgcacccagggaataccagcgggtgaagatggcccggccggcgcttcctcagtctggagctgccaacactgacttatgattcagcctccagtacgctctacaggcaggaccagggtcgctgtcccctctgcccccacccagcacctgcagggaggtcagagttctgagctgacaggaagctgtgctgtgcagcagccgtggaaggcctggactccggagccaaactcctgaggcttgaatgggattctgctcatgactatctgagaccctcaggcaggtcattcattaacctccctgtgtcttggtttcccccagacatgaagaagatcaagtgaaatgggcattatcttgtggatgtctcgatgtctctcctatgcactctcaggacacggcccagcacagggcacctgtttgaggtggtggtgttgctctcattgttttcttttgcttctctgttttgataggacgctaagtgccaaaggaattatttaactcctagcagctggaatctccctgctctcaggttcttaggtttacaaaaagaactgtcttgacaggcaagttcctgaaaacctctgttctgtgtttaaatcctgatgcacatctttgctaaaccccaaaactagctcagggtactcctgggacctcaggacttcacgcagagcaaccaagaaaaaagacacttccccattgccaccaaaacctcctggccattcattctttagagaacagggcccagaagtgtccatggcactggagttgtgtatgtggggaccgtgaaaggaaaataaatctcaggaccccacaatcaccaagccaaagggaagcatgaagctgggaaccgtgtcagcaaacctggcttccattgtgcttctaaataagatagccgcaaagattaaaaagctacctacctccctcagaatttgcacacacagagattccttgtggacctcaagatctttatcctaaaacagttccgctgaagttcacccaggcaatgtaaattgatcgtttatcttcacagggatgggacaaagaactcagctcctaaccctctgctcacccgagacaaaggtatatctgattgtttcttctgccctattatttatgcaaaaatgcagattcaatgagccagactaaggcacaaatgacaattcctctgcctccctctcacatggaaattgtgtattcagtgaaaggctcatcagagactcaaaagaatgcaaccctttgtctcttctctacctattgaaaccaccattgcaaaatgataactgagacagtgaaagagatctgacctaactccatcgtgcttctaacctccaagctgtccttgttcattcctgggtgtaggctgaacgaactctgtgaggagcttagtgtgtagtttagctttgaaacaaagaagataacagccctttcccaaaacaagcctccttccctgcctggaaataagactgcctttgcaggactaacaaattggccacaagactataaattattgtttaagagccatgcagctagaggctgaaagattctgaccctccccaaattgctcctggagataacatcactattgtaaaacctaagatcagttattgagatattttgtagaccctgccctctatggatgaactagctcatctggtcttgtggtccccacccaggaactgactcagtgcaagaggacagcttcgaccccctatgatttcatctccaacccagccaatcagcactcccaactcactggccccctagccaccacattatccttaaaaactccagtctccaaattctcaggaagactgattgagtagtaataaaactctggtttcctgtacagccagctctgcatgaattactctttctctattgcaacatccctgtcttaataaattggctgtatctaggcaacgggcaaggtgaacccactaggcggttacactatgacccagaagcccccgcttcaagttgtctcacctttccagaccgaaccaatgtacatcttatacttattgatgactcacatctctctaaaatgtataaaagcaagctgtacccagacagccttgggcacatgtcatcaagacctcccgaggctgtgtcacaggtgcgtccttaacattggccatgtcctgaattgattgagacccatctcagacacctttggttctccgtgtgctcaggcattttatgtaacatgtgttctggggtgtatcctatctaggcgccctctattgtatctggctgagcatggaagcaggctgcccagtggaatgttctgtctacagaaagtcacgaatatgccccattctccaaggacacaaacacctagacatgaaacccccactgcacaccacaggtggttctttgatgggtgagtgggtgggacttgacagccatggtttcttggtcaacagctgcagtgttgggatcaggttcccaaagtgctcaccctgcaaaggccagggcttcccagggaacgcactgctgaaaatactctctgcttcccaggagctggcctcacaggctccctaaacaatgcttctcagacctcagtggcatgagaaacatctggaagggtgattacagccaaccttgggcccctccctgaggggtttggattcagcaggtccgaggccgggcctgagaagccactttgctcacaagctcctgggcgctgctgctgccccggggaacccacttagagaaccacttgtccagaagtgggaaaggccgttccttccacgaactcaccatccaactcagaggcgtggaaaactttcaaaggcctgtctcgggggcaacccagcctctcctccaccccaggggaatagcaagggggtggtctttgacagagaggagcgcaggcagcctccctggcctgtgggaaggagcttgctgtccacacaacgcagaggcagaacggaaggttgtgaggctcaggcgtgcagcttgaattctgatgaccagtaaccgaattaaccgaattcagggttatccgctaggctctctcaacaactctggcccaaggatagaatcaacccacaatttctctcctctgcggtcatctgaaccccaggactgctctcccagcctgacagtcacagccttggcaggacgggaagagccatgtgtctgggcctgcgcagcacctcagcgagcatggcgttgcatttgacgcccggatgagggggaggccctgcttgtggagctcctcggagcagctcctcagctcccccaggctgaggaaccccgaccaccccccacctgcgtcagaagctgcagttcaggaagcagaggcaggtcagagcaggcccaggactcatggccgcgtccactcacgggaaaagcatcgccaagcacgccgggcagggaagatgctattctctagaatacctgcatgctgtccaaggtgttctgcgcgaagagcaaagcaagacagttacagaaagacgccgtaaataaaagacacaattcccagcacatccgaattgccttgtttttcgaaccaaagcacgctgcgttgcgaccgtcaccacatttgaaagcatgcaccaccagcagcacggggtgacaggtgacagcgggatcatggtggagcagtccctcagaggcggattgaagccacacagggtcatgtcaatgggctccggggcaactggggagaggcaactaccttttctgccaggagacgatgcaaattaaagtgcggtggataactcaggccagggaaagtgaattattttccagggagataaatggccatttggaggtctgtttctattctcccaggttatatattttcctatttgctattcatcacactcctccctccagatagtcattaactaatggaggctttcagaaaatccattttaatatataggatgataatgatgaaaccttttcctgtgggaggaatagactttaaaaggcaacgtaagagatgcacatagcccgttttaagtggctgctgctcccccagggacacaggacaaggtcattctgaagagggcagcctcatccaatattggcctcacttaagggaacattaccgggaggacgccaccccagggcagatcccctccgaggtaaatctctccttgagggggtggtgaattacacgatccttgacttcggcaggtgggggccccagctcactgtagcccagccactgtgcatgatggatgcagacagcagaggcctgagggggaccccatagccctccctgtctgcctggctactcactcccaaggaggctggcattggaccaggagccagggacaggggtggtcactcccaatacgccactcacgcaggtgggacgtagccgttgtttccttcccaaggccccagtgggaaacatctctgggaggcaggagaaggccactcatgtcgtgtttgcgaggaccacacccggggaagtgcctcagatggcgctgaggactctgattccccaggccctcctttctctgatcctacaaatgcctccccaggatgggtgtcataccttaaaaaggtaccccaaggcagttcatcagagaccaggatggcctccggaaggtccaccggcctttacccctggggaaattaattcacaagcaagcgagtgagccacgccccctcactttccacccaagaggagccaccagaggacagcagaccacatctgagacacacagttctgggtctggatgtgtggccaagggaaagctgcttaacctctctgtgcctcagtttccctgtaagaacggacctggtcctggcacctgtagtactggttgcttgtgaggatgacatgagaagacacatgaatggcatctagtaactggtgcaccaggcgcacttcataaacatcatctattatttctagcaggcatcagggcaactctccccaacgtcccccacccccgggcagaaagcaggggcacgctccttacctctagcagccgcactgcgccttcatgctccttcttagcctcaacctgagccttttttatgatgaaaagagagaaaagagtaaatgtccaaaggggaaagaagacaatcggatcaatgtctgaatcactgggggtgggggatcatttatttttattcctctaatagaggaattaaaattattcctacattcattatttaacttttatttgagtttcagaaatacatgtgcaggtttgctgtacagataaattgcacatccagggggtctgggacacagattatttcttcacccaggtgataagcttagtagcagaagcatccctccaatgcctctgacagcaccttcatctgcccaaacatccgacgaactgctttggaaacaaaacctaatcctgcagacttgactcccagtcagctctaggttccctgagacctcaccaggccctggaggaggggccggggctgggtcctgagcatgcaacaggccttggcacctgcagcctgtggcagggccgccctcttcaaagcactggcggcaaagccatctgggccccacagaataacttcacatgtttcactacagaaatgtctcgggatggctgctgcccaggcaaagggcagattcaagcacatctgagatggaacactatcatttcttgtcctcacaggcctggaagtcccagcatcaaacaccgttatttcttgtcctcacaggcccggaagtcccagcatcatcatgatggtaaggacctgtcgtgtttcaatggctttgatgttttgaaggtccttgtagccctcggcatagttccttgagtctcactaacttttctgcagacctaacgtttcaaaagacccatggaggcccctcactctgctccatctaagccaatgcccgttgtcccgtcacagtcgccaggggcctggacggcttattgctctgtgccccatctgacccagctagatgcccagcacttcggccacagggaatctgccctcccttctgtgagcgccatccccccagatgctcctgctgctcctgctgcagggcctgcccacctcctggatagcggatcctctgggtaacaggcctgttcctcaggcctcttcctccagcgtcaggagctcctctcctgggaagaacctctggactggctggggtctggacctcccctgtgccaagcacagtctgaaccctcagcgactggtgacctgggtggtgtggggcctacggagggcaatgggcctctgcctgagaatgctgcgggagagggaagcccctttctattggactttggcttgggaggaggtgaggctgcagccactttgccaccaggagggtcagggctggagtggctgggggtctccacagggaaaccaaggctgaagctgatccagaggagggcagagagcagccaagtcctggtgatgtcggggaggccttggattctactgggtctgaggccagcagatttgagccctggatctagccatgtctgaagccacattttcagtgatgggcacaaaaacaatttcctgtttgggttttctgtcgcttgaaaccaagagtgctaacgaacgtcatcgtcaactgtgaaagcatgggacacttcctaaagtgcggacactggaggttggttttctgaggctgtaatgagacagagaagaaaagacgaaccaggctcccgcctgcagcacagtccacactgtgcacccctcacactgacatcagcatctcccaaacattccccgtggagcaggaaaatgggggtttttaagaagcattattttctgacaccagagtgcacctagctcttaaaacgtggaacactaataaagaatccatatgctacgctgtgacttacatttacaattctcagtttctagagaaatatttcctctagctgcctggagaataattagtgatggacgattcaacatcataaataagcaagtgaacattatcttaacagtttctacttctcattctcaaaattccgtgcgctgaaaacagggaagagcttggcttccccagccaaggggaaatctgccattccctgggctaaaaatgaagagtcgtctgaggtttctgtagagttcattcatatgagttccattctcacatatttccaatgagagttttaagagctgggcaagtgactggaacacagcatgttaattacaccattctcaagttcagctcaaccgtcgaaggccgaaaactgttcctttcaaagcaaaaaccagcaagagcaacaataaatagcaaaatagaaaaagagacaaacaagcagggaacatacagggattatataaatgatgccaccattgactcagttgaatcaaagatagttttcaactggcaggattgaaaaaaaagacaaaacaaaaaatattccagcaggctgttaaaactcagccaagctggcagtacaacttcgcttccagcttcagatgaaaaccagtgcatttttgcaggtgcaaactgggccatttgggcaatcagaatagactgttgaaattggcagcgctgaattcttacaaaatccaagcaacagcttaagcgaggctcatttaggggccaacacagggaaagtgcgacctttacggagagtggttcctgcagagcagggagactggagctcccgacgctggaggaagaggcctgaggaacaggcctgttacccagaggatctgctctccgggaggtgggcaggccctgcggcaggagcagcagcagcatctggggggatggcgctcacagaagggagggcagattccctgtggccgaagtgctgggcatctagctaggttggatggggcacagagcaataggccgtccaggcccccggcgactgtgacgggacaacgggcattggcttagatggagcagagtgagggaggggcctccgtgggcgttatgaaacgttagctctgcagaaaagtcagtgagactcaaggaactatgccgagggctacaaggaccttcaaaacaggagttccgcagagctgagggctgatggacattttctaatactccaggagcacacaggattagggcagacactgcctgaaactaacacagagggtcagctatgacccaccgcagccatccacacacaactgaggccgacaatctgagggcagcacagcaaattcagtcaaagcattaactatgcatcgggcggtgagctcagcttctcttagtatcacacgttacataatagccttaagactgaaagcggtcattctaccagtaagaggaactgtagaccgaagtaaaatcggtcaagtctgcggatgaattataaatacggaaaagccctttagctcacaccactggattatcataattgccacttgtcacaagacaaggatgtaacctacacaagaaactgaaagtctgaagcaacggagcgcagccggaccccaggctgaccattcacctggagaggaagcctcagggtttcagaatcgggtctcaagtggaccacgggcatgttagcctcagcctccttatccgtcacatggagaaaacaatggtgcctccgccccgcaggttacacgagggctgactattcattgattccctccacaggcatttactgaatgttaatgagaatttatcctcggtcatcttatctgcgggattttgaccctactgccccgactgacggaacctcgtcacatctccaattccttctgtgcccttgagcacctccgcccatccaggatttgctggggagctcctaggtgtcaggcgatgtcctacgagtccgacgcgcctttcacggagctgaagtgccaacaggtggaggtgggcagtcggcaaacagccacatgagcgagcaggcatgttttggcatcagtaaatggggcgacatgccctctgtctgggcatggagtggcgtctggtctgagggagactcagtgagagaaatgaaccagttctgcaacaacctggggaccaggcattgtcgataagggtccccaagaggggactggctttggcacggtccagggagaggaggaagcagctgcagcatggggagcgggaggagtggcagaggtggcacagctcaaaggaggccacgactgcactccgggtcccagcccggacacgctgcaccagcagatttgtgcccagagtcgcttctaccatcgtcatgaccattcacagcctgttctcacaccgtcccactccttgctgtgttgctgggacttcactgacatgagacgctccgtaaacgtctgttgagtgaatggacgcagggatttgtgaatgagctcttgctcccggtctccaggaagcacgcgtctcccgggagagcctgaggttaccagcagacagcgtgggtcctggcttggctgccttttgcctttttaaactgtgtctctgctcaggtcccagagacgagggctgcagcatgagctcattgtccctggattccgggaggagagccctgggcactttcatcactcattcgtcattcacccatttgtttatttctccgatttaacaaatgctttccctttcacatgatcttacgtgcttctcccgaccgccatgcagggcaggaggacaggtggagctgcctgggagaaaggtgcctctggacaaggtgctgggatgcaggcccctgatattagacgcctgaatgtccagcaccctctcaagggtggtcaggtctgggggtgaagctgatcccaccaaggaatctctaagtactgcacaatgtggcacaatccacctgtatttcaggaaaaataaactcctgcctcacattgcacatcaagaaaaacaacattataggatggaggaagctgaggatgaaagcacaaagaggcagggaggagacccgcagacggtggggaggggcatttccaggacctggactgaaggaagaggccaggggctccaggcgggcgtctccaaggggaaaatggaatcagaagccccccagaggactgagactctcttgagaggaattttacagcttcagcagggtattggggaacaaaggaatgatgggtacacagagaagtaagacaacaagcaaacaaaaaaggcaattaactccagggaaaggaagagctgtacaaaaacgggagatgctgccgtttacggagctcaaggagttcagcagaagtgcaggtgttggtgaggacagaggggagttctgtgtgggacgtggcgtccgaggccccccaagcagtggtgtcaagcagagggtgagtaaaggaattggggcacagtggcatcgtctggcttccgggtctaaacccgggagttaccacgcagaggtggtgctgaaacccatgcatctatgtgaggtcatgagacagtgagtatagactgagaagggatgtgacttcaggactgagtcttagagtcacctgtgatgtgtagaggggctggtgtggagaaggaaaccaggagagggtggtatccttggaggccataagctcaaactgggcctccgggtcaaagaaaacgaggacagagaactacccactggaccgtaagctcatgcatgggtgacactaacaaaagccacttgttgggggtggggtcccgtgacggcaagttcaagaaagagctggggttgcagaaagagagaagagggtcactcctttgagatggctccacagccctctcatcagaatcacctttgggccttggagagtccaaagacgactggtgacttctatcttggtagggggatgagggccagtcttcagctaatccgtgcctcatggtgcaggcaccactgcctggtggggtaagcactccagctctgtgcctcaggcccaaattcaacccctgttccctccctggctgcaccccagctacccggccttcttcctcttccctggatgcgctgggctggttcccaagggggcctgtgtgtgctgctccctaacccttgcacactcctgccccagccctcggcgtggtgggtgtcatctgctccttgaactgtcacctgtatctaaagtcacggccccgtcaatccgccactcaagcctctcaactcccttcaccccttgccatcatctgggcttactcgctttttcactgacttgttcgtcttccttttttagcctgggagggcagagccgtgtcccactcgcagctgtgttcctgcttctggaacagcagctgagtggctgcttggaggggcagacggccgacccctgctgaatgacggtacgacggagctggtcacaagtgcagtgcaacgaccacccacgtggaaactgaatgcaaagatgagctctggaaagaagtcccggatctcattccactcaagagtcagacttcctcttctcatgcttaaaaactacatcaaagcctctagaaattacaaaattggcccattcatatttcatccagtttctctccctctgcccctcgccccactagtgaagcatcagtgtgtccaaaacagagacaatggtgagtgcggggggataaagaacgccaagagaactggacagcacacagaagagatcgtggacgcggaataacagagtcagttccaggtcattctccttggcatcaaatgcttagtaaatctaactccaggcttctagagaatgttctgttgagaggagacatcctttccccttcctggacagtctctgtgtttctacagacttatatctgtctcagacggtccccgcctggggacgtggcttctggagtgtgacgaataagtgcaggtgccatcaggcgtcacccggccacgggaaaggtccttgagacatggcaggagaacataagagtaatattcctgcccgtgtcccagcaatatcccttgcggataacatctaatgaaatattgctgctccgggtgcctgccaccttattatgacaggtaataagggctgtgaagttcccatcagcgctggcttaatgaaatctatccttaatacgatctcatgctaaatgcttagagaaatggcatcagaacttatctacctgtttccacaagctctgctaataaactctggaggagaaacgctgctccggcagattcctatcgccccccaggctgggtgaatgactgtgagccctttattttgagatccaagacctggataagctgtcggatggatcgaggggccacctagggcagaggagtggcccatcccagccagcaccgggcgggaggctgcagaccagccagctgcactctggccacaggggtggctgccctgccaggaggaggagagggcagggctgggtggggacactgggctctggaaggaaatgagatgagacctgttcacaggtccccaccttctgatttcttcctgggggcaccccaagcccataggctccgggagcaccaccctcctacctatctggagagagacagcaggaccgtggctgaggactggagtggggtgaggttacctttctcagtccccagacccatcacaggtgcccaggaggtaaaaatcccaaatcactcagtccttccttccctccttccctggtgcctctctcctttctctcctgatttcttttcctttctgtcttactcatcttgcctttttcctttcttactgggatccggctataaatattgctctgcaactcagttttctcacttgataacacatcatgcaacagcctcaagacagcagaatcaaaccaccatgatccttttcgctgacatcacacggcgcctggtgtggatggaccatggtgcacacagccatcacccttaggtgggcatcaattgggtccagtccctgtccccactgccacacagcagcactgcaagaaaacaaaactccttttgaactggttcctgtactccttgcagggcatcgtccaggatgggggtggcagggtcaccttctgtgtgcccttttagtttaaacggatgctgcacactgctttttccagaagcggaagcaattcacaccctgccagccatctctacgcatgtgtttttcccgacaacctcaccagcatcagaggttagagctttgcatctgctttcgcgttataaaacatgaacacaggtctacttaagaaacaccacagcaggaaagcagaaatgactctgaattcttctgtgcaagcagagagagggagcggcctgggagccaaggccgcaggtcggccgctccaccacaccagggatccccggcccacccgtggactccctgcctcgcacgccgcgcccggctgcccgccgcttaccttctgcagaaggtcaatttcctgctgcttggcactgagaacagccagggcctggtcatgctccaactgcagctgctgccgccgttcagccgcctctcgcatatgctgtggggacagagagaggcctggctgagcagggcagcctgtgcccatgggcgtgcatcctataccctgcaccaagctggctctgactcagcccggtcactccagagcagcccctcaccgccccacagggcacccacctccgtgctgccaacagggctcctccagaggcggcactcccaatgcgggagctatgacataaacaagccccccacctgccacttctcctctgcaggttccaaatgcagcgagcatttgagcagaactctgtcctcatgcaaatgtgactttcgtctttttgcttgttttgaaaaagtgaatctccctcctgtgccttttttgcccaggtcctttgtatataacagcaaaggcttattgatgctgccctgtgtgcccagcactggttcagggttttatctgcatttaagtcatatcatccccatcataagcctaggaggtaggttctagaagtagcctcattctacagagagggaaactgaggcacaggatgtcatccttgcccatcgggcagctgggaagtggacgcctgttcagaatgcaaacccagagtccgcaccctcccgggagcttcccggcctcgggccgagtccgcaccctcccgggagcttcccgacctcgggctctggtcctgactgccgactccagtgaaccagcgcactcagacccaggagtccaaattccttcacttacccctctgggaaagtcgcaaggtggcccccatcagccaggcccattttctgcagcagagaggacagagccgggttcctggctctgtcctctccccctgacaatccgtctgtcctgcttggaggggcggtgcttaatccccagtgctcagggtttaactctcacctatttgccctctgcgggcccttccctcccctctgacgggtctcacgagcccagagtcaccactgggaccctgacagtgaggaccaggcccccagacccatgaagctcacagcagtgaccagccacgaaccctggcagcctgcaggaggaaacacatgggaaatgacattgggtagaaatggccacagcgggcgggtgggtagtcacactgggaacagtcacagaaaacatttcctggggtccccaagccactcctgggggcttggaaaaccagctgcaaaatgctagaatttcattgtcatttcctttcatacacacacacacacacacacacacacacacacacacacctgtggtaacttcgtggtcaacattttaaaatctgggtcttttatataaaagaccagattccttcaaaaatgggaagagttggccacgcatgcctccaggaaaggactgagaagggagtgggagctgccccttccgatggcatatacccccgatgtctgcggccccacgggcctgccccccatgtcccctgacatccgagggccacacagatgacccaggtcctaaagcaagtgggtgtcttggccccagcgagccatgggggacccacacgccttcctcctgggctggaactggttggtcatttattttttattattttattattttacaattccattgatttttagccttttactcatttttatttatttttatttttttgagatggagtcttgctctgtcacccaggctggagtacagtggcaggatcttggctcactgcagcctccacctcctgggttcaagctactctcgtgcttcagcctccctagtagctgggattacaggtgcccaccaccatgctgggctaatttttgtatttttagtagatacagggttttgccatgttggccaggctggtctggaactcctgacctcaggcgatccgcctgcctcggcctcccaaagtgctgggattacaggcgtgagccaccgcgcccgaccaccttttactcatttttatttagttttggagtcttaaaggcctgtagccttcgcaagtcatgaggtcggacacacgcgtccaagagaaggttaacgtggtttcctgaggccgctgccaactcagcctgagctggaaagaggagcctggcaggggggaggcgagggagtccctgctgagactggcaagctgtgagggcggggggcacccaggctcagggggaggggtgtggcccctcgggaggaggcaggtggtgagggcgggggcacccaggctcagggggaggggtgtggccccgcaggaggaggcagacaggctgattacattcttcttgccagttttccaaaggtagccctactgctaccttttttgctgcctctgaaagctcctttcttctgggaaagatcttgaaacagaaccactttaactgagggtggggaaagcctccacttttcattctgcaaagcgctgtggttggtgggatattttgtttgtgtttaaaaagtgaagtcttcctcccggcccgtgtttcaggcacggcaacctcacgtgctggttcatctacatttttaagctgaataaactcggcatcctctctgctgtctccagaagaggctcccagtgaactcagaagctggaattaccctgcacccccacagacatctgggggtttcactgttgctatgggaactctcacaagaacccgggatccggagaaaatggagttccccaaaacatgaacaaaaccccatgaaacacgggtgtcgcggtcagtggccctcgccagttcactctggggccagatgggccccagggaaacaccatgcttgtatcttcccacgtttactccagctctgagcctgggcaggcctggccctcctgggaagaagccctgggtatttgctgcacagccctcccgagatccgccctgacacactgctccccccgccccgctgggctgtcagcccatttgggcctcgccatttctaacggtctctttccaagagcctcagtttccccccgaccccccaagccgccaccaccaccaccacccaccgcccaccaccagttcactgtgagtgcaaaccagctgcatacattgcagggcatttttaggaggacggggacaagccaccaagacaaactgacagagccctgggggatgcaggggattccccgagctcctgagacgctttgggaactcttctccaaaccctggctgccacctcagtgcggtgtggctttgctctggtgtcaggtttccccatgagggtcccagaggtcctcaggacggacagtctctgcagaccctcatgaggccctccgtgtggggcttccagctccagagaggactatttctactccatttattcattcattgcttcttctggatattggttcatcggactggatttattgagcacctactaggtgccaagaagctggggacacagaacaggacaaacgtgtcttcatgagagaacaccccagagtgggggcacagtgtgaaggcagatcgatgaaacgagaagggcccgagtgtggcacggagcaggatggaggcacctaaatgacatctgtggtcctggacttcaggagtggccatttcctacatcctaacaccagcctcaatctgatacgaggaggagatttcagccagattccaccaggagaactcgctcactcaactcactcaacaaatacttacccaagcacttgttttgtgccaggcaccctgctggcttctgaaggctacagcaacgcaaaacaaagcaaaacaaaaccagctctcttggagctcacattctgcaggggagggggcacacctcatcccaatacacccattgtgtgtgtacatgtgtcagattctgcaggggagggggcagacctcatcccaatacacccattgtgtgtgtacatgtgtcagattctgcaggggagggggcagacctcatccaaatacacccattgtgtgtgtacatgtgtcagattctgcaggggagggggcacacctcatccaaatacacccattgtgtgtgtacatgtgtcagattctgcaggggagggggcagacctcatccaattacacccattgtgtgtgtacatgtgtcagattctgcaggggagggggcagacctcatccaaatacacccactgtgtgtgtacatgtgtcagattctgcaggggagggggcacacctcatccaaatacacccattgtgtgtgtacatgtgtcagattctgcaggggagggggcagacctcatccaaatacacccactgtgtgtgtacatgtgtcagattctgcaggggagggggcagacctcatccaaatacacccactgtgtgtgtacatgtgtcagattctgcaggggagggggcagacctcatccaaatacgccgattgtgtgtgtacacgggtcagcagtcctaagcaccatggggtcaggcggtcctaagtccacaaatgcacgcacctactatgcagccacaaaaattgtaaaaaattaaaaataaataaataaaaggggagaaacagaaaaaataaactgctaaaaatatacttttactttttataaacaaaggggatgggagctgcagtcctgctgggggctggcctgtcggctgagaaggccaaggaagccccccaccaagatggtgctaaacaaaggctcacaccagagacagagccccacgcggctgtgggtggaaggcgggatacacagtgcccagagcccccaccctcacctacacacagtgcccagagcccccgtccccacctagacacagtgcccggagcccccatccctcacctacacacagtgcccagagcccccgtccccacctagacacagtgcccggagcccccatccctcacctacacacagtgcccggagcccccgtccccacctagatacggtgcccggagccccgaccctcacctacacacggtgcccggagcccccaccctcacctacacacagtgcccggagcccccgtccccacctagacacggtgcccggagcccctgtccccgcctagatgtgtccctgagccatgccactaacaggggctgcgagggcttccgcggctcctggaaaggccccagaagttcccccaggcactggcttgctggcatggacaatgtcccatgggaaggatagactggaggcgaaacatctctccagagtctgccggcgactgtcacttaggtgtccttggccggaaggagcccgatgccccccgaagtggacccctggccccatgtcgcatcccagctgaaagcccctcggtggggagtaaagcggcatgctgtcacagggccacctgactgcctcttgcctcctgatgccgctgccaccaccatctgcctgcctctcatgccctgctgtaacaccctggctttcgcgctgtttctaaagagcagaccagtgcccgcctctggaccttcacacgtgttgctctccctgctagcctgactctcacgttccagcctttgcccagatgccacttcgcactgaagcctggtggccgcccggcccctcctggatacaccatgttctccacctgccttattttcctcctgagcatcctcatccccagtgcactggccggctcccttgcctgctatctgctccttcccctggaacatgagcaggcaccttgccccactgtgtccctgtccccacaatgggtcactcggcacagatgccaaataatcaaactgccgccttcatggcctcttggagctcagtcccactgctgtccccaccacccccttctccagccacatgggcctcctcccagcccctggagctctccacgctgcccacatcaggggctggcagggaaggttgggggaaaagtgcttccagcatttcaggccagcaaaagccattaaagagcctgaacacctgggctcaaatcccagctctgatactggcccgctgtgtggtcttagagtagttacttaacctctctgttctccatgttcttcttttggattaatttttcaacactattctttttcaattggttagtgattagtgaaataactaatgttgattattaattaacacccacttcatagaggtgttttgaattttccttggcatctattaagttctctgtgttatgttttagtcccaagaggagaaaaccctttcccactggacgtgtgtagccctgtgtgatgtcacttaaacaccaggtacagggtgggagggagggactcatgaggcaaccagggctgcaccaacaggatgatggacagctaccgccgcattggtaaaatgacggtgagaaatcggaatgtggctgctgtcatttattaagcacctactatatgcagggcactatgcttgcccaggcactgtgtcatttgaggctgagggttgggtgctgtggtcactgcatcccagcagagcaacagactcagggaagctgagcaagggctaaaagccacagctggaacatggccgatgagaatgtcagaactcacagccagtctgctcccggccactgccccacttctgggttgagatgacttacaccagccactgccatcttggagcactacgggggccagggcagagaagcagctttcgacttcctcgcggcccacctggcctgggtggccgattgtgcagctgcttaattctgccattttggcttaattctggctaattttgtgcttctctttattttggaagggggcactgccaaaggcagactgtatcatctttatttagttctgggaaggaagttgttagcgagaggagggtgccaccttccctaccaggactcgctaggtagattcaccaggcaccgaaacagctccgggcgtggtcctgcggcctcagagtcactgaggataaaggggtggcggatgctatgctgggctcttgcttcggggtgccagtgagatgagggtttatagatcagatggatggaaacaagtacagggaagaagtctttgcatttctacggttaatgaaccaagtccgtacaaagcagctgtcagaaaggcgtgagcgggagaagcactcggccctcgaagacagcctcagtttcatcacagatgccatggctgggaggacaaggtttgctggggcttgttttggcttcagcatctatctctccaaatcttacctgtttctgcaaagccctcatccccctccagccactgcccatgtatctgcctcccatctcacacgctcttccagcccttccagtcagcctccctcctgtcactcggctgagattctcccactaaggcagccgaggagtccctgcagcccgaacccatggccactttcgtgccctgactggaccaaatccctcagcagcacccgacaccagggctgctcctcctggacatgccctggactctggcccccgtggggcgcgctgacctggtctctccccctgacctctgcaatgacctcccgctgatctctaaatcctggaggggccacggctctatttataccattccttaggtgatcttagccagctttgaggttttaattgccacataattccaaatgaacccttcatccccgtcccccgcccccccgccactcatacccaactgcctactcattatccccacatggatgtacaggaggaagctcaaatttagcctgtccgaaatagaattcttgattttcttcctcaaacaagttccctccccaagctgtgccatctcggccaaggacaccatcatcccctcagctcctccagatgcaaagctgacagtcattcttgacttcctgccccctttcccgccttgttcaacatccagatctttgagaaaaaaaaaaacctcccaatttaaaaaaatgtgcacccaaactccccccacccatgtctgccgttctctcctgtgtccaacgctgccacctcatctctcccctagactatggtagactacggcagaagagccctttctgccccgagacagctcctcctctcccctggaccataaccagctcctcagagccctttctgccccgagacagctcctccagagccactggctgcaccagagattgccccacagccattctccttcaagagcacaaaggctgccaactgcaccgggaacaaaatccagactcctggctgcagccaacaggctcctctgtgatccagcctcttctctgccctcacctctcacctctgccccttcctcactgtgcttttgccacactggcttcgctcagttccatgatcacgtcaaggtcatccccaactccaggtcttagcgagtgccattcctgctgtccgacatgcttgtccctgcatcaccacgtggccagcccttcacggcgtgatggggtttaggatgtgttccctccaaacctcaggttgaaatgtgacccctgtgttggaggtggggcctggtgggaggtgtctgggtcacgggggcatagccctcatgaatagcttggtgccctccccatagcgataagtgagttcttgctctgagttcactcgagagctggttgtttaagggagcctggctcctcctccctgtctcttgctacctttctcaccatgtgatgcacctgctcccactttgccttctgccatgtttggaagcttcctgaggcctcaccagaagctgagcagatgctggtgccatgcttgtacagcctgcagaactgtgagataaattcgcttcttttctttacaaaatacccagtctcaggtatttctttataacaacacaaaacggacaaagacatggcaagtgtcctgaccagtgaccagagattattttatttacgtgtttattctatgtcatcctttccatcccactccctacccttgtccatgagaaccacaggatcacaggacttgtttccctgtctactggtgcacccccggcccagaacagtctctgacacatggtgaggcagaatcaatgacagcaaaggtgaggcctctcgcctaaaacatctgtcccacgcccccagcccacactcccctctccatccctcacagcctcccacatgactctgcagcaatgctgtaacctgcttggtaccgttctaattccatgtaattctcactttctcaactggactagaaatggctccatttccgtgtgtgcactccacaggcaacaggagtctaattaacattttctaagtggaattaaagcaatgattttgagtggaggattcatcctgtggctgtctagaaactagactttaacacttgaggagcctagagaagattggatcctcactaccaaagattccacatttcaccaaacccacagtcaaaactgtgaaccagagacataagctggttctcctggaggccatcacactggcggagttagtcacgcagctataataaaacatctctcggagatgggctttgagactgatgagggtagagtgaagtggatggcgaaaaaaaagtttaagccaaaaataggagagatattggctgcaaaggctgaaattcgtggtgttaggtggatggtaggggaaaagatagctcagtcagggggtggtgggggccgtaagtttaatattagtgaggtctacgaaccagccaaaaaaaagagaaatggacaaggctcacaaacacacggacatgctaaatatatccatccatcctggcatgaggacatactgattcattctgcacagcgttacttttctaaatgtagccagtgtgcatgtctctgttgaaacatctatagaaaaatcagtgttgcaaggctgagatattaatcaatgtttctttctatcactaaccctctatttctcctccattcccctcccacttcccatcctgagggctccattccatgctcactgcctcagggaggatgagagatgggtcagggaagagcagaaactggggactcccctgggctttggtctgcagagataaggggaatcaagaagacagcatacagaggggttactgtgagaaactgagactagatttcccttctaatctgcagaaatatattgcttcaccagaggcagacaaattagctgagaagaaccgatgcatgtatagacactggtggatgggctcttggctctgctttctggaaagttccagagagctgactcctacagaattcacggctagcatggggagttgagaaaatggagcttaaacagcctggcagggatttctgaacgaccctgggatagctaagagcccacgtgaatgcatacaactaaacaattaaattctttcatgtcttatattttacaatgtcttcaagtaacttttacccttgtctctgaaataatggaaacaactggtagacggtggcttgtctacttttacagcctacatataagcaatacgcatcggatagaatggtgggaatctgtgtgtgtacgcctggatgagggcaggatggaatcccacaacatcttggctttgggtcaccctgcaccccagcctagatctcaccttggtgtgccaatcaactgcctcaggtctctcagatctactctctctccttctcttgttttgctctgtatcagaaagagctacacttcccagacgccctcgccctctgcttctgggtggtcagtcaacaggcagcatcggcgggagggaagccagggatttctacccctctctctgcctctcgagctgtctcctgtagaggctccgtctcctgtagaggctccatctcctgtctctaacccacggtctctgctcctgactctgagatcatcatcacccccactgtcccttcagccttagaggtgatgccaggttcacaatgcagccatctggcttcttagttcttccaccctgtgtgtcacaatcccctgtattaatgtccctccatttgaaataccttggctggctcctgctttttgactgaagtctgaccggtagactgaaggaaaaggatgaagccaactccaaattgatgacacatttctatcactctttcaaaatgcgtgtcttaaaagtgaattaagcactttgggaggccaaggagggtggatcacaaggtcaggagatcgagaccatcctggccaacatggtgaaaccccgtctctactaaaatacaaaaaattagccaggcatggtggcaggcacctgtagttccagctattcgggaggctgaggcaagagaatcgcttgaacccgggaggcggaggttgcagtgagccgagactgcaccactgcactccagcctgggtgacagagcgagactctgtctcaaaaaaaaaaaaaaaaaaagataaaaaagaaaagtgaattaagtaatgttgagggggttgttctgtttctttcacttgagttgttgcaactggactcaaacctgcttcacagacttactgtgacaattctaagttaaaaaaaaaactcacggaaatgttgattttgctgaccacctacaaagcagaaaataaatctgtccaggaaaatgtacaatctgataatgtttttgtttacttatctacaatttagcttggattttttactatcccttagtttgcttgaaattttcctattaaaaaataaatggttttgatgcttcttcccaactaggaaagcttgttctggtcccagctgtcagacaatcccgggctgatagctactttaatgaatcagcagcagaagtataaatcggggtacagggagatgggggtgaagatagaggtgcttggtttacctcaagagttataacatcacggggcaaaggcaggttcggtaagttccagctgccatttctctccaagggccaggaaacaacatcttaagataaaagtcactggccataaacaaccttattcaaggaaaataatctcgtctgcagggcacctgtggtgtgaaggctgagacctgtgagttcagcaacagaatcggccaagtgggggctgcagtaaacccctcggcttaccggccagtccacaggactaaaagagaggccaaatgccaactcaccccggaactcagccacaccataaaagagggagatgtggtcagagttcagtgggagggtggggagcgaagtgggaagcggtctacacagcagctcccgagccccctgtgtgtagcaacaatcaaaacccacgttagtgtttatcacagatcaccacctacaaatggtgggaaaatggtgttcttattccggtatgcacattgctggcacagttttcccagagaacctgcctgagacccagcccagctccagacatcagcctccacatgctcacctaaacacatctgaggattactaagttctagaagtactgttatgctaagtactgaacacacatcacccatttaatcggcacaacaacgcttgaagcaggtgatatttttattcccatttacagagaaggaaaccaaggcccagagcggttaagcaacgtgttcaagtttgcccagctaggccaggctcaagccaggatttgcacctagcgagcccagctcactctccctccactgtctctgctctctgctgtctaagaggcctcctccaggacctctctcatatttgcgggatgtgctgatgtttgctgggactctcttcaaggcagtacacatgagaaccttttctgcagtgccctgaagtcactccgcctccttccttccagagttctcaggccaccacgcacactgttcgtgcctctgtcacagagccatctgcacttctggggggcaatcgcactttccttctcacaacttccacaagcagctaggagtctctcggttcctgggagtgcaaggggcccaaggattcccaaagggagtctgaaaacctcgggtttcgcccagagacagaatcccaccacaccctgacaccgggcttccgcctccccgcgcagagaccttcccagggcacgtgctgtcattcatgggaaggcttcacatctgaaaagtactcaggattatgcgccacggccaaaactgcctgtctgaaacgctctgcctgtggcaggatttatttttaaagcagcgatatttatagctgactgtcgacattcacgccagcacttaagctgcctacaaatgtcagggtgccgctatcccagggaaaagctcggatgtgacacggaacgaacgaacctgaagcaaactgaattatctcctcaacgtcagatcaaacgtggacttgtcctgtgcttggatgctgccttgcctgagcgaagaaattaaggaaaaaccaatttccccaaataggagctaacggtgacactttgaatgtcacattagtgggatctgctacgcgtggtagaaataatgaagcatttatgtacacacgatttgctttcacccagcacctggcagaaggaatgcaagcactcacagaacccacgtcttcaaaagcaagaaagacaaggtctttaaagctgtttgttttcatggcatcacgactgtctgtcctagtcacagaagtcacactcattaagaatgagaatgtgtgtgaaaaacattcatgtgaattcagtgaggtctatttcagcccaagtattttagtttctcaaactgggaaaaaaaatggatccttaggagttcctttgggggaaaaaaaaagagagagagagagagaaagattttcctgagtgttgattggtctttgatcctaaagcctccttccttctcctctggccctgatgaatcctagagatgcaggggtggcaacattcatccatgctgctttgggagggttatttttctcacacacagtttctgtcctgccccagtggctcccggctgtgagcccgggattttggccagccaagtagaggggatcttatcagctggacctgtgttcaatgccatttccaacacgtacaggctgtgtgccctggggtgagttaggtacctctctgaacctcaggttccacgtttattgaatggcaacaaaaaataccgtccttcctaggttgtcgcaagaatgagattaaatgttagattcaaagggatctgcacagaaccaggtgcggcagctcacgcctgtaatcccagcactttgggaggccgaggcgggtggattgcttgagtccagaagtttgagaccagcctaggcaatatggcaaaaccccatatctgctaaaaatacaaaaaattagccaaatgtggtggcaaacacctgtagtcccagctattcaggggactggggctcaggcaggaggatggcttgggcgcaggaggcggaggctgcagtgagcctagataacgcactgcactccagcctgggtgagagagtgagatcgtagctcaaaaaaccaaaacaaaacaaaaaaacaaagtgacctgcacaggaattaagtttcatgtaaatatcactaagttttatttaggtctgccactcgatttggcttctgttagttccctcccattttcattatttgatctcccctttcctgccttctttttgttttttgttgtttctttttgttcgttttgttttgtttttgagatggaatctcgctctgttgcccaggctggagtgcaatggcgtgatctcggctcactgcaacctccacctcctgagttcaagcaattctcatgcttcagcttcctgagtagctgggattacaggcgtgtaccaccacgcctggttaatttttgtatttttagtagagacggggtttcagcatgttggccaggctggtctcaaactcctgacctcaggtgatctgcctgcctcaacctcccaaagtgctgggattccaggcgggagccaccatgcccagcctggttttcaattttaatgtctccatggagtgctgttctgtatgtttttatgtcactcctagtggttgccccagggaactcaatatacatatttaaatttaaacaatctactcagaattaaaacttgccattccaagtggaattcttacatgctccatctatatacctgaaaccccatcacagtgttctacattttcgttgaagtgtcatttatgtacatgaaagagtctaccaggagaaaaacagcctggtctagcctgttacatttacccggatatccgccctttctgtttctctcctctgtccagtgtttcctgagcaccaactacgtccaggtggcccgacaggcactggagacacagtggacacaaagctgagaggccctggcttgtgtggggctgacatcccagtgggaaagacaagcgttgatcgggtgaggatataaaaatgcaagcttgtgatgcatgggtaaactgaggctcacggagatgactcagccccttgtgagtacatcccacactctgggacagagcgctcattctgtatcactgcgctggggacagggacagagcggttcagaaggacagaccccgccctggccctcctggagcccactccacaccccagcaagcatcaggcctagaagttggcacctccccgccaccacggttctccctgcactgctctgcccccgcctccacagtctcacggtaagatggtggatgcaaacgtgctttgaaagatgcaaagcacagtggctcatacctgtaatcccagcactttaggaggccaaggcaggcagatcacccgaggtcaagagttcgagaccagcctggccaacatgctgaaaccccgtctctactcaaaatacaaaaattagccaggcatggtggcaggcacctgtaatcccagctactcaggaagctgaagagggagaatcgcttgaacccaggaggcagagtttgcagtgaactgagattgccccactgcactccagcctgggcaacagagtgaaaccctgtctcaaaaaaaaaaaaagaaagaaaagaaaagaaagagcaaagtaggagtcaggtaacccacggaggcctccaggaccctgcactccagccctgtgtgctggttactcaggacacaccctcttccctgctgtccagagcacttggccttatgtgggaaaaggatgcatttgtgaccgctgggtcacaaagtaccacaactggcacttctgcttaagacaatggaaagtgtcctctcacagccctggagcacagaaggctgaaatccaggtgtcggcagggccggatcctctcgtggaacctctgagggagaagccgccccatgccccgctccagctgctggcgtggccacgatgcttggtgatctttgaccagaagacacctcactcccatccccttgggtgtctctgtgcctcttcttcttataaggacaacagtccttgggtttagggcctgccctactccaagatgaccttatattaatgacatctggacagactcattttcaaataaggtcatattcacagatacatagatttaggacttgggcgtcatttgggggaacacagctggccctctacatgccctgaaatgatgaggggggctgcttcacttgctccccatctgcctggattcatgcctctggacacctgccccagaccaagccatcagccacgctggtacatgccctagtggctcccgcctcagtgctgcccgttgtctcctcttgcccctgtgagatttccccagggatgttgcttggtcaggccactgtcatcacgtgggcctcagctgaagtgtcaccccctaacagacatgtgcagggtgccctgcgctcccctctccctccaggtcaccctggctcatcaccgtcttcctccgtctctgaaattcttatctatttgctggatgacctgattttttttctgagctcctcccaccccagtagaaggtaagtttcatgaaaacaaaaataaccttggacttgctcctcgttttactccaagcatctggcatggtacctggctatccttctgtctattctagtagattcctttgagggtgtatatcaatgaaattgctcacggtattagcaattcttgatcactaacctctccagcaccagccactatgttagatcactgggcacattctatgctttgaacccttacatctagaaaggtactttatggccactttaaagatgagagaacaccccggttctcagaaattagttagcttgatcacacgtaaacaactagttaatcatcaaattcaaatttgaactcagactggtctaactaaaagcccaaagtctttgaattaggtcatgctactgagatcaacgggaacgtccccctagggtgggtgatgattctgccgctgactcattggacctaaactgtaaagcattgtggaccacggcagagagtacgtccgtgcctgtagccatgtgatacggtttggctgtgccccacccaaatctcatcttgaatagtaactccagtaattcccatgtcttgtgggagggacctggtgggagataattggatcatgggggcggtgtcccccacactgttctgtggtagttaataaatctcacaagatctgaaggttttatcagtggaaacccctttctcttgattctcattcccttctcttctcttgcctgctcccacgtgacacatgactttcacctaccaccatgattgtgaggcctccccagccacatagaatggtgagtccattaaacctctttcctgtataaattacccagtctcgagtatgtctttattagcagcatgaaaaaggactaaaccaccatctcactgtcctcactccggtctcagcagccctgctgagcagctctggggtagaggaggctgcgaggggtgaggctccatccacttcctgcaggagggatgcttctgtccacgggagaccagcacacagtgatacctcatgaaaggccacgttcccatcaccctgagcccccttctatgtcgggcccccagcagctatggcgctgggcaggcccgctccccagaaagtgaccacatgatggtttcctgcctgtgatggcctccttcaggcacacctttctctcacctgcaggccacccagaggagccaaggaggaccgcacacttctctgcacactgggactgctgtcctctccctgaggagtgggaccctcaagttgttctgcccaggccatcagaccatgactgccccgatgtcactgagcagagtacagagagactgggatgtgtatacactgggggcttaaaacaacagcaacccatcctctcatgccctggaggccggaagtcttcagtcgaggtgtggacagggccatgtaccctccgaaagctccagggcaggctcttccccatcttgccaggctcctgggcgctccatggctctgatctctgcctccatccacacgtggcttcctccctgagcgtctgtgtctctatccaaactcccctctcctttctttccaaagcctgtcactgaacgagggccctccctgatgtgcgaccgcaccttcacctagttacatctccaaacacactatttccaaattaggccccgcgccccagttctgggtggacatgactgtggggaggctgattgaatctacccctctgtccagaagcttctcacctgccttctgctccctgggctccgtaatcactgattctgctcacagcctctggtgggtccaccagtccctgcctctaactgcttctagattgagctctctgaatctagaaaccttgtgagtgtgaagttaaaccgtccttccctgccaggactctaaaataaaagcagctgtcgctctaccgcatccgacgaacagaactgtctcacgggccatgggagaaggggctggagagatgcgttctggccgtggctgtgagcgaagcaccaccggttgcagtccctttacccaggagctggggagaggctgaggacccagaatgtcttgtgtatcaggcagtagaaactcacatgaaaaacacatgaggctttttttgttttgtttttttgcagtgagtaaaaaagcccaatgcgttttttatttgaatctgagaagctggagaataaaaagcattttgtttattttatcacaatgcactcacttctgacaggcaccctgcttcagaggagtgctgggtgttttgatcagactcctgtgccaggacctaagaggaggactgactctgggttaaatgcaacaaggagtgcgcggtggggagatccttgtctgacaccagcctgggctgaggagatgccggaaatcaccaactctcctgtgtttattccccttggagagtctctgtctattccagaaaggaactgcagattgatctgtagatgtgactttatacagtcacctgtgagccccagagaagcacctctgcagagaagcaccctgactccaggcctcctgctgctcggtcattctccatgaaggcagcactgactccaggcctccggctgccccgtcattctccatgaaggcagcactgactccaggcctccggctgcccagtcattctccatgaaggcagcactgactccaggcctctggctgcttagtcattctccatgaaggcagcaagtgtctgcagtgccggtcggttcagcgaggcaatctgtcaacccctcactcattcatgcgtgcacttgctccgttactaattcatcaatcaatcagtatttatcgagtgtctactatatgccagattttgtgctgggcactagaacaaaggctgtcttgaggatgttacattttggtagggaagacaaatacacaggcagacagttaaagcagacaagatgagtgcgctgaagaaatggaacccagtgatgtgcaagtgaccagcaagggggcctctggtcctttagaccaggtggccacgaaagcaacatgaaactgagacccaataagccaggaatcagaaatacaaagtgctgagggaaacagcattcaaaaaaaaaaaaaaaaaacactcagtgcaggaaatccgagctagcctgtggagaggccacatgaggagagaaatgtctggcctgccccctctcttccagccatcccaggagaggacaacatgcaggcaaagagccagccaaggctgcagatgattgcaacttcagttgccatctgagcgtaactacccaagtggaggccccacgtgagaaccatgtagctgcccagtcaacccacacagccatgagacatcaacacaaatcactaatctcagccactcaattttggggttgcattagtccattctcacactgctataaagacatacctaaaactgagtaatttgtgaagaaaagaggtttaactgactcacagttcctcaagctgtacaggaggcatggctggggaaacctcaggaaacttacaattacagtggaaggcaaaggaaacgcaggcacatcttcacatggcaacaggaaagagcatgaagcaggaggggctacacacttttaaaccaacagatcttgtgagaactcactcaccatcacaacagcaagggagaaatctgcccccatgatccaatcatctcccaccaggtctcttccccaacattgagaactacaattcaacatgagatttgggtggggacatagagccaaaccatatcagggtgctttgtgatacagcaatagctaacttgtatacctctgtgcggtctccctgcatctcctcttgcgtactacgtctctacagagttgcagatataattccttaaaaattcaggttagatcacatcattctactgttgaaaaccctctaatggcttcccatctcgctcaggaaggaaagagccaaagtccttatcttggccttcaaaagctttaagtgatctgctccaagtcatctccctcatctgacctcatcttctaactatttccccgtgttcattctactcctgcacctcgggcttccacacacttctcagacacagcaggcattcaccctctgccccaggacctttgcacctctgcacagctccctccctggcttcatccaggtctcttttcaaaggactcacccacagtgaggtctccccaaccactaaatgtaaaccagctcttccatgactatcactcttcgcctcttttcacttccccacctgacctgcacattaatttatcaactctctaccagaaccaagggcatggatttagatcactttttccagaaactagaaagcgtttgatgcaaagtggttgctcaatatttttgaatgaatatatctttaggtgtgggttcaattagatttctttatttttaacttttattttaggttcaggggcacatgtgcaagtttgttatataggttttaatcagggcaaggactgtaggctttgaaattcttcaggaagccagtgcctgaggtaaacaaatccatttccctttaaaatctgtatatctggacatactcttctgactcttcaagtgaaaattacttggcagcccccataatacggtcaaaaagggctctgtaaagaaccatgtgggctggatgcagtggctcatacttgtaatcccagcactttgggaggctaagacaggcagatcacaaggtcaggagttcgagaccagcctgaccaacacggggaaaccccatctctactaaaaatacaaaaattagctgggcgtggtggcaggcccctgtaatcccagctactcaggaagctgaggcaggagtatcgcttgaacctggcaggcggaggttgcagtgagcccagatcacgccactgcactccagcctgggtgactgagcgagactccttctcaaagaaaaaacaaacaacaaaaaataaataaataagccatgtgttgctgtgcataaccaatcacaggctgcagggaagcagggcacgttgtctttagctaaattgaatgatcactattaagacaggcggcacatcagtgatatttggaaacaaaaaagccagcatatgaatgtgaccagtgggctaattttcagttcagacaggccctgaatgcacattggcacagctccacagctgtaactacccccgttaacacaggacgggcagtcttaattcacaggccgcatgtcccctcttacccctcagtcactttaggacatggaagacacaagacgcgtcaggtgctagatgagaacggtggccacaggatttgggaacaaaggccgtggtgatggctgcctgagcttcatgctttaacccaagtgagccgcttctatcactctaccacacgcgtcatctaataatggaacaacatgggtttcttgaggatcagcagggaggtccgtagagtgggaacccggagctctcccacccgagcatccaggggtcacgacacactccatctcccacacgtggtgacgccctgaccctgaaccgcacatccccaggcttccctgtcacagcagatgacaccattgctgccccagaaattaacgtcctgactccttcctgcctctcacactccacgtccagtctatcagcaaaccctgttgattccaccttgaagacacaccccgagcctgtgcacttctccccaccctgccttgctggaagcccccatcatctcgcatcaggacatggctcccagtggggtccctgcttccactcctgttttttttctgtgcggccactggagtgaccctctacaaaccaaagccagatgcacctcctctctcaattccagtggcatctgacataaactgattgaaaactatgccacagtcactccctgcatctgaggtaggagggtaagagatgggggttggactctggaccacacagcactagctaaattaggtcccaggtagaagcaccttcccatgagacgcaccgcagtgccatgtcagtttaccattgccatggcaacgtccagaagttatcgcccctttccatgtcagtgacccagccatccagaagttaccaccattttccaataattttctgcataacctgccccttaatttgcatgtaattaaaacctggtttaaatacgacttcggagctgcctttgagccacaactctaggcgcacagcctgtgaggtagccttgctctgcaaggagcaggacctctgctgctgctatgcacagacacttcagtaaaagcagctaaccccaccagcttgcccttgaattcttccctgggcaaagccaagaaccctcccatcctaagccctgatttgggggctccctgccccgcaccacatctacattcttgctgacgtaatttcttggctcctcatagctggagacagagtcagcttccccatcccctcaaaccaggcagactctgagccttgctttggccaacggaattcgagaagtgccttgccccattcaagcctgggccttatgaggtcttccatgcctctgcctcattcacggcccaactgtaccctggccagaagccctgtcttgcctgatggaggaggggagagcaaggagcaaggcagtcaccccagcccaaccaaccaagaccctccagtggccacccaggtgcatgaagccccggctggaccggaggagctgttcagtccagtccggtcaagctgagaagctccatgcagccaatcagaggtttgggagcaatgatggactgtgaccgcttcaagccccaggcttcgggacggtttgttatgcagtcttattgggacgggggtaatacatacagttctacagttcttggaattctaccttggcctgtaagactctggccaatttattcccaatccgggtttcattttttacttccctgcccctccccattcactgtccggcccactttcttctccttggacatgtcaagcatccatacatcccaggccctctgcactccccctgcctggaatgctcctccctgaacactgacagggctgcttcctccctctgctcaacatgtaggtctagggaagcctcctggaccactcttttaaagtgccaccatcagcaggaactgatttcctcctcgtttacccaatttatttttctgcaaagcacttatcactgcctgacagtgtatcacacgcatttgactttttcttcatcgggcagttgaatgttgaggtctattttgctaactgctatacccctggtgcctgcaacagtgcctggtacatagtgctcaatcaatccttgtgaatgaatgaacagtcatgcaataagcagctcatggcccagggatgccacgtgtgtctcactatatagatccctgtttaggtgcaccgatgtacccctttcccttggtagggatggaggggacagggaaattccccaaaagacagggtggacttgcaggcggagtctagttagaccaccccacttggttcagactccagtgcttttccatctcttggtattttaaattccatagaccaggaatgaagggctccagaatactacattttctcttgtacaagtcccatcaaaaagaacacagctgggcatggtggctcatgcctgtaatcctagcactttgggaggccaaggtgaatggatcacttaaagtcaggagttcaaaaccagccaacatcgcaaaaccctgtctccactaaaaatacaaaaaaaaaaaatattatccgggtgtggtggtgtgtgtctgtaatcccagctactcgggaggctaaggcaggagaatctcttgaacccgggaagtggaggttgcagtgagttgagatcatgccactccactccagcctgggtgacagagtaagactccatctaaaaagaaaaaacaaaaaacaaaaaaaacaccaaagaactcttcttgagttcttcccatatatggggcaatccagccttagcgttcctccccaatcctccttgctaacgatgcaaaaaaggcttgaaaactccatatgccattaggctcttcttctccaaaggaagagacttggaaaaattgctcctccattgctatgaaaatgttcctgacaaccatttcttctgtatttttctgcatcctctaacataacattccgagtaagaaaaccatgtccagcacgccatgctttgttttgctggggaagcagtgagctcccttccccgaaggagtgagaattatgcaattgttcatattttcttttctgtccagcctccctggaaactcggagccaaatgagaatcttggagtaactatgttcagcctctgaggtggtatatcttagttctttcttctctttatgcaaacattccacttccttcatatcacttcattatatttaatgattttggtaattaggccatatgcttggaaagaagcataataaaaacacattcacagataatgaagtcatcaattatcattttttaagtaagaaaatcaggagggactcaaatcaggttaaatatcactgtgtgatccatgctgggagcaggggggggtgtctagtcagtttcagtattgttctcccatgattgttttaggaaacattcagccccaatttcagtcttttctatttcactgaaagcttttatatttggaaggaaaactacatcccgttcacaattcagtaaaacccagtggtgggtgtgatttggtggcccggtcaccaggctcttcaccaggctggcacttcagtgtctttgttctgtgcaggcaaaggggaggggctgtgagccggccctcaggcacacttagctgggaatcctgcaccccctgactcctcccaggatgggtctctgatcccagtagaatcctcttcagctctcagcaaatcaggttgattgaaactctgttgaggttccaattccactcacatcactgacaacaaaagaaaaaatgccaccaactcaaagggtgtgaggtcagaaaggagggaagatgctgcatcgccggctttgaaggtggagcgcgaggccctgagcagcccttgcagctggaaaggcaaggaatgaattctccccaaagctcagaaaggcacgcagtcctgccaacaccagatcgtagccctgtgaggctcatctcagacttctgacccccagaactgtaagagaatatgactacgtcgctttaagccaccgagacactgtgggatcacttgctacagcagcgataagaaacagacacacggtttctgagctcagtaccactgacacgtgggaccaggtgataatctgctgtaggagactgatctgcacggatctgcgcgtgggagagggttttacatccctggcctccccttccccagtcatatcaatcaaacgtgtcctcagacattgccaaatatcccctggagggcaagttggcctcactgagaaccatctttcatggctttttaatccaacagactctccgctaagctccttcctcccagggattcacggcacaccctccattaaattcactaagccctgaacctgtgtcccaggcactaaaggcagagggttggataagtcacggtgtgtgccctcagaaaactcacagtcatcgaggcagctgcttaaagaattatgtggtagcacctcctctcttgagggttacatcctgaaaacttagagcacacagtgagaagcaggatggtgagcttgctgagaaccgcaggaccagcttggttcacattcagggccggtagtcagagaatagggcatctttctttgctaatcgagatggcatcattcttttctaattgagatggaatccacatgccatgaaggtcaccattttagtgtgcagtgccccatggttttggcactttcacaaagttctgcagccatcattaccatctaactcaagaacattttcatcactccaaaaagaacctcataccccttagtggtcactcctcatccccatcccccccatcccccaccccctccactccccccaccaccatccctggaggggtcactcctcatccccaccccccaccccctccactccccccaccactatccctggaggggtcactcctcatccccaacccccactccctccactccccaccatcatccctggaggggtcactcatccccatcccccaccccctccactcccctcccactatccctggaggggtcactcctcgcccccatcccccacccactccgctccccccaccactatccctggaggggtcactcctcatccccaccccccaccccctccactccccccaccaccatccctggaggggtcactcctcatccccaccccccacccccagcacccccccatcatccctggcaactatccagaggctcccctcagagctccaaacgcttccccaaagaggctacagatggaggtaaaatcacttcttgatttaaagagtatttgcggatgcagcctaatcctgttttctgcaattgtgaaatgcaaatgaccctggtaatatatgtactggatcatagaactggagatgattatttttttatttttgtaaaaaaatgttttccagaatgataatccaatcaaattttaacacttggtgaaaaaattcattcagcttaactcagtggcatcaatagcaaatcaacccactggctaaatattgaaggagagctcagctcatcaggaatgcatgaggaacatccagttacctgtaccccctgatagagcaaggttctggtttagctatcctctttataacaaaggtcattaaacgtctgaggagcagcttaaaattcctgaagtttgaaacccactgtagccacctctggtctttaacgtaggcagactccatttccattcaggagcggtgtgcctgccactgcacagctcagctgtgtttaacatcctaaaaaatggaaatgcataattggctttacgggattgcttccagaaacactggaattttgttatttattgctttttataccacaaaaaggggaaaaacagccccaacatctctgaatgtggatgatggcttccaaaggagctttacataccttctgctcggggtcctgcagcccctccttcctcacaccgacctcacaaagagcagaagcggtcccaaatgcagaaagccagcttaccttcaggacctgttctaggttctccagcttggcttggagctggtgtttctccttcacggccaaatcgcgctctctggtcacgagggtgagcggatggttgagatgcacatactctgccttcacctgcaagcggaagggatggagacaaggaggttatcacaacatgcctaagagttggtatccgttgcttcctctttaggagcaaaatcttcaatttcctcctagagaatccttccctccctccttctccatcatggactgggtccactcctactaggggtcactacacatgaccaagggctggccaatcagcagacgacctccatcttcctccctcccacctccaccacagcctcagtgattggttcagggttgcaaatgtgtcacaggtctggccaatcagtgtaatctcatcccctggatgtggtgattggttggggaagtcacatgacccagttgcattctgggggaatgagatcttgcacttgtataggaacccggaagaactctcccttttgcccactggactcggaaagttaaagacaaacagctggaactactgtggcctttgccatcacgagggaagaacccatctgagaacagagccaatgagataaacacagagagatgcagagggaaaagcaggatccccatggcatcatttgagcacccaaatcaagctgagcctgaagctaattgtcttttccttttcagtcacttggaccaatagattctccttgtttgcttacaccaatttgaatcgtctgtcccctgtaactatgagagccctaacagatacaagtgttttcccactgtctaagcatatttattcttgtctaaaaattttatctcatcttaaaagtgaataaaaatgccaatgaaattccacatgaactagaatgcattcccccaataaacccaaaaaccacataaattccattctcaggccacaacccccagggccaagctacaagcttattgggaaggcaagcgccatgttcagtctctctcctcttcgaaacaagtaaggggatgctgtcaacgaaagaagtcaccatggttcctttcccattcattttcattgtggaggcaacatgttttaacccaacggcagccttgtaatttcttttcctcctcctcaagtgttatgatgtgaattatggcttcaataacagactaacataatgtcacgcttttcagctgcagaagtcctttctatttcaaatacattctgtactgagtgttagtttaacctgacaacttctggggcaccaaaagaaagggaggcacccacttggcattcccaaatgggaacagggttacaggaaagctgttattaagaggtcgtagagaggtctcattcgaaggaatattttaatgccattttgctgcaacgtgatgttatcaggcaacgaacttagagaaataatccaaatgcccccggagaaaatgtcacgacctatttgaattaaaccaccctcacttctgaacctcaataccctggggtgcaggtttgcagaaagcatcacttcttgcatcctagctgttcaagaacattaggacttgggggtcatgcttgaatgcccctaaattcagtctcacacggtgaccagcaccatctttctgaaatacctgccagatcttgcctctccctgcttgaaaccttctgtggtttccacagaaattagaataaaatccaaactccttggtggtctaaaagtcctacccacctgctaccctgttgccactatgctggggacaccctggcctccttctgtcccttaaacaggtcaagcttcttcccaccccggggcccctgcacctgctgattccattgcctgcagatctctacccggccctgccccagtctgctcaggtctggctccttctcattaggtgtcacctcagacaggccttcccaacccttgcaaggtgacgaaacccttgccttcaccccctgcctccatgcccctccctcccacaccaccatgctttggtgtccacgtgtgctcagcactgtcctctgcggctgtttgccttcttcctgtggctgctcctcattggaacagaagtgtcaccagacagaagttttcttctgccttgcaatttcccatcatcagcgcccagaggaccgcctggcagggagtcagtggtcgagcaagatttttgtactgaatggaatggtgttgaggaaatttccaagagtggaaaggtggccctggctcctgggtggactattgctgtcagccctcccagacacaggccccactgtcatcaatccccctttgtgtcctgagaggctcatcctcatggcctgcaccccccgtaccatccggcttctaatcaggcttgcccagtggaagacatgatcaagaaatgatggatcagcatgacccccggcccccggccctccccaccagcctgcagggattaccctgagctgctccccttagaaaggctgctggcgagcctggcccttggctggaggcctgggaagcaggatttggggagaattcctaccttccctaattgattagggcggcttaccacatctaggccacttgaacaggacagtttatgctgaacacctttccttctgggagtcggaatttcagtatgtgccggacagagagtgcccatgccaccaggtccccataaaaactctggctgctgaggctttaatgggcttccctgacagatgacatttcacacacatcacagcttgcagctgcaggtcctctaagcatcctgtgtgattcttgggaatcctcttgggagacgacctggagagcctgtacctggtctaccccggcttcattctgtgtgcctctccctttgccacctgtgctatgtgtccttttgctgtaataagtcacagccctaagggcagctgcacactgagccctgcgagtcctcccactgggtggtggaactggggtaacccccaacagtgtccttctacagggagggcctctcccacacccttctccctgtacccatagcaggtggccatggcccccggcctctgctggtctcagactcccaacctcctttgcaggtgtcctgcccatgccctctgcccccccgccccggcaacagcacccacacctttgttagtactttcttttctaaactctgctccatcctccagtttgcaagtgctgtgtatttgctattgtgaccctgatgggtaaaatctccaaaggaaaaaacattagcagcccagaagcaccatgatggctcagaggctccctacataaggagtttctagtttggggaggaatcgattcagattcgtgtttcacagagaagccaacttgggtttcaggctccatgtgcagaacccagcatgaagatgcatttattatccagctttttataagagcactggacagtcaggaattgccttctaagggtcagcatccagtgctttggtcaagaacagacaacctccaacctgcggacaggctgccgttccagtgtgaacctggaaagaaatcaccgggcaccggaacgcattctcccacaggtgtgttacaaacggcgccagaagctagagtccagctggcccctaaatcctatttgtcccacagtagagctagaagggagctaaatttaatacggtagagtggaaacactgtgtttctgcagtggacaatatggtggcaattgcagtgacttaaggcaataatgttgggggaacgaatgggtgtgttgacctcgaggtgatgctcataagcaaagtaaaaggaaagatcttggaggaaggtgaagagtccagacagagtccatggaggacctcggggcaagccaatgacatttactctttctttttttttgagatggagtctcgctctgtcacccaggctggagtgcagtgatgcaatctcggctcactgcaacctccacctcctgagttcaagggattctcatgcctcagcctcccaagtagctggggttacaggtgcacaccaccatgcctggctaatttttgcattttaaggagagacaaggttttgtcatgttggccaggctggtcttgaactcctgacctcaagtgatctgcccacttcggcctcccgaagtgctggaattacagatgtgaaccacctcacccggctgatatttactctttcatggacctcgtctcatgccacaattatggttttgcatttctttgacttaaaattccccatagtgtcatctttttgtttaccagaatgatgaaggccatggctctggttcgcaacaaggaggagagggtgtgtggacaaggagggggagggagaaccgaaaagactgatttcctggatgtataatggctgaataacggccccacacaaagatgtccacatccaaattcctaaagtctgtgaatatatcactttttgtggcagaacggaccctgaagatgggattgcatggagcatcctgagagtgggagagcaccggggttatccagatgggctctacgtagtcacagagcccttatcaggaaaagcagagtcagagacaaaaaagagagagcttaggtgatgctctgctgccagctttgaagatcagggaaggaagccaaaaaaaggcaagaggagagactgtcccccagagcctcaggaaagcacaccggcctgctgacatcttgactttaggactgaagacctccagagcggtgagacacggtggtgtgtgtgcttgtaggaatttgtcacagcagcaataggcaactgatgcggaaatcagctaaacagcagtcctcgttaccgcgagcacgcgtcgaattgtcactctacaccaacaactggcatctgtccctggaaagccctaagccccagtgagctgggtcccacccctccctattcccccaagtcaaggtttgtcacttcctctactggtacagcccccagggcttcagtcaccccagtggctcccctaaccctgcctgcacctccttaagaatgcttagcaaccctcaattgcttttggagtatgcgccatctctctcctgctgggaccagactgagaccgtctgtgacacggttctgatgagcctggagcagaaatctctagaggacaatgacctttcatgaaacagagcttcgtgagaaaagcttcagcccctcttcctcccaccacagtggggatgcgacccttcgagatggaataccacctgtctcggtgtcaaggaagccaccctccacacacgtctctgctggacaggagcccctgggccctggctccttctccaggcagctgcctctggccagggtcaccacctctgggcttcctgagcacaacagtgcccttcgtatgaaacccaccaagctcaggcttctgtgaggggcagctggaaataaccccagctgataaacctggagaagggggcgttctctaattcagcagccgctgatcccacctggatagaggactgatgccactaaattaaaacacgataaatattggctcccacgggccactcaaatgctggcgcctggggccggtagcccagaagacagcctggcagtttcttctctgcctggttgggctttgcagcccagctcgtgccagggagtcttggtggatgggtccttggttgacaaatgccctggcctctggctgagcacaatataggggtgctgggatccccgctgcatcaaggtctctgcctcaaagtccattgctttcttttttttttcttgagagagcctcactctgtcgcccaggctggagtgcagtggcatgatcttggctcactgcaaccttcacctcctgggttcaagtgatgattatgccttagcctcccaagtagctgggattacaggtgcactccaccatgcccagccaatttttgtatttttagtagagacagggtttctccatgttggccaggctggtgccaaactcctgacctcaggtgatccacccgccttggcctcccaaagtgctgggattacaggcgtgagccaccgcacccggcctgggtccctgtcccattgctcctggactagaacagtctcctggatgttctcaagggccaaatcagtctcctactaaaggagaaagtggactcagagtgacaaagatgactcagagattttcactaagacacacaaccaaagaaaaaacatcccagatgttccaggttaggagcccagacgattcttcctttgtcctgatgaaatgcaagatgaacaacagttccctcttatgcgattttttttagagaataatattcagctgcaaccctgggctggacactcacctttcagtcaaaaactaagcctcacgaatcccaaatgtctatgtgtgtcatccttttaaactttcataatttttttactaggaaaaaaaatgtttaaagagggaaattgctagtaagttgcatggttgccatctcataccagtgtttcctagctgtgcctatacttctacaaccttttgggtttctggccagcaggtaagaggattccctaggttgtaggaaattctgacccatgctacagcatgtgctcatgggtcatgaacttaatgacctactagtgcccagctccagaatgtcaggtactaacagggtttgagtgattctccaagacctgctcaccacacacaaacacaacagcacattagcaaccctgggcatcagatccagacactggactggattttattctctaaaaaaatctcataagagtgaactgttcttcacttagatccagacactggactcatttctgtttcaaaatagattcttgtggcagcaacggtggcaccaggtggaagagaagcttggaatatttggcatcagctactcaatgtgacgaaaaccttgaacctcagacctgctacaggaacagtggcccagtgcggggaggagggagctttaacaggcacctcctaacccaaacagagaagaaatttgaattatttttctgaaatcaacaaaaggttagttttgcagcttcaaaggcatcaagcatattctttgcactatgtcttggatcccagctcatcggtttcctcccacaaggctgcctgcctaagagaatccaattcaacactccagacagcccaacatcacagtttgcacctaagaaccaatcatttccgcacagggaaaaatgctgacactgcagtctctttgcattcataattaagagctctgagaattaatttccatctcttaatcagtgctactgaaaagcattttgcaattccaagcaagaatcagataggggaattgctgatccccaagtgtctccagggatccagaaggacactgttgtttctgcaggtttgcattgacaagcctacccatgagtctggagggacagttgaatacttccatcagcacaaagtcacccccacaccttcagcctccccagctaccacaaagatgctcagcccaagagacagtctctggggactgccactccctcaatgcctcccatgcaggtagccagcccaggcacttggaaggaaagccaagctccgcaaagcaggctgcaggacagatctggggtgcccctgctgcctctctcaaagcactgctattcctgtccatgccgggtgagctgctgggctccctcagacacccataagaagcagaagcaaaggccagctcatttcctgtgccttgcagccttgtttaaaaggccaagctgagaagacagcagggggagaaattcaaacctcaagcaaacaaacaaagtggtttgaatcctgcgggagcagggatgtcaagctgcactaccagccatccaggaaaggaggcctttgcctctgttgtgagggctgagcgctgggacccccacctccgccggcccttgctggcctggtcaatgcctgcagggctcagctccagcacccccatccccccacagctggcattgcctctccaggtgcaggagcccagctcaggagtggaacgtgtacacatgcagctattttagtcgtaggaagaaagccatcccaggatccgacctccctgtgcccagctccccaccagccctgtcgtcagcctgcgctggaggcctgaagcacccccatcttttttatatttttcctcctatttgaagaaaaatactcctgtcctaagaaagtcactaagccttatgatgcattcagacctcagtgtgagtgagtttagcagagcctttcctgcaagtgtaggtttggaaagtgggggctggtggaaaaatggggaaagcatactaattggagggtcaggatatattaagacactttttttttgagacagagtcttgctctgtcgcccaggctggagtgcagtggcgtgatctccgctcactgcaagctctgcctcccgggttcatgccattctcctgcctcagcctccagagtagctgggactacaggcaccggccaccacgcccggctaattttttgtatttttagtagagacggggtttcaccgtgttagccaggatggtctcaatctcctgacctcgtgatccgcccgcctcggcctcccaaagtgctgggattacaggagagagtcactgtgcccagcctaaaacacacctttttaagaaaaattatgataaaatacacattacataaaatttaccatcttaactattttacatgtaggtatttcagtggcattaaggacattcgcactgttttacaactgtcactaccacccatctctagaactctcttcctcttccccaactgaaactctgtcttcattaaacagcatctccctatcccccctctacccagcccctggcacctccattctactgtttgtctctatggctctgatgactctaggaacctcatataagtggaatcaaacagtgtttgccctttgggactggcttattcacttagcaaaatgtccccaaggttcatccatgcagtagcgtgtgtcagagtttccttccttttcaagggtcagtaatattccattggacacatatgtcacatgttgtttattcactcgtccatcagtggaaatgtgggttatttccaccttttggctactataaatttgtaacatgtacatatatctatttgagaccctccttttcaattttttttttcttgagactgagttttgctctgttgcccaggctggagtgcaatggcatgatctcggctcactgcaacctcaacctcccaggttcaagcgattctcctgcctcagcctcccaagtagctgggattccaggcgtgcaccaccacacctagctaatttttgtatttttagtagagatggggttttgccatgttagccaggctggtctccaacttctgacctcaggtgatccactcacctcagcctctcaaagggctgggattacaggtgtgagccaccacacgtgactgccttttcaattcttataccaggattgggattgctagatcatatgcaattttatttttaattttttgagcaaattccatactgttttctatagtggttgcaccattttacattcccagcaacaatgtgcaggattccagtttccctacatcctcatcaacacttgtaatttcctaaaaaacatacctttaaaaaatggccagacaggaaggcaagaaaataagtgtcaaatcaagacaactctaatttttatatttaatcactagagctcagttattccttgaaatatgcatgggcaaagctgcaaaattaacagcttaaaacaacccatcattcaatagatgttgactgagcacccgctatgcatcctttgaaggtacaggagagacagtcatggatgtaacagcaaagctctctgcaatcccaagcccacattctcgtaggagacagacaaacacataagtgaagacccgtgatagactaagatagcaagaaaagatacaaagaacatgaaaacaggtgttgtcacatagagaaaaaagggatggagggagggctgttagagtggacgttagagccacgaatccttaccaggagggacgcgtaacctgagggttgaaaggcaagaagctcccagctgttgaagatgatggagtggagtgttctaagcagagacaaccatcaaatgctgagacaagcttagggatccaaggaacaaaagtaagtcagaggtggacgagaggtagcaagatggacaggatggcagccacagggagaagcctcagttttatttatggaaggcattggaagggtcagaggattgcatgatccagagggcatcacaagatcactccagttgccatagggaaaagaccacaggatgacaagggagctagacaggccagttaggaaatggctttggcatctgggaaagagaagatgaccacagtggagaggagggggaggagagctggggcacgtctggtgctgagatgagtggttggtgcgctccatggtttgaatgcatcccccaaattccatgtgtgggaaacttaatcctcaacagggcagtactgagaggtggggcctttaagaggtgactgaatcatgagcactctgccctcatgaatggataggtccattcatggattaatggatcaatgtgttaatggaccagtgggttatcaggggagtggaactgctggcttaataagaagaggaagagagccctgagctggtatgtgagcacactcagtccccttgccgcggggcaccctataccaccttgggaccctacagagtcctcatcagcaagaaggtcctcaccagatgcagcccctcaaccttagattctcagcctccatagcttaagaaatagattccttttctttataaagtaccaagtttcaggtattctgttataagcaacagaaaacagacttgagcagggagttagattcggatgaagaaagagcagcgcccaggaggccccatcatggaggctcaggcaaccaggagtggccacaccattcactggggagaaagtggtttgggagagtgggcaccaatgggtttgttctgccttgctgttaaagatacaggtgcctaatagacttccaagcagagataaccagcagatagtggatgagacatcactgggtgcctcacgtgctggtcatgtgaagaagtgagagagacctggctcagcctctcaggccaccttcacactgatgttcagtgattcttccctgccccttcccagttgttcctccctggcccagcccgctccctccagggccccagatggtctgtggacagtggtatcagctaccttgtcatgctgccgggcccttgtgggaaggcctgcatgatgggatctcaggagatactctccctgggtggcatccttcagttcattttcctaggacaaaaggaaaggacatgtgagatggtgcccccatgtttagagacttggtagagtgcagtggttaggagctccaatgtggtaatgagacccaaggttgggcactgattctgcaatccataagctgtgtatgagttgggactgatttctctcttttttccaaaccataagtttccaaatctacaaaaggcaatcatgttatattatacgatgattagaatataatacaataatacatattaatcacttagtgtctgtgtcctaaaaaagcaacggaacttctcgccaattggagttgttaataagctttgacccatcctttttcccgtgaacactgctccaaacatacagccacaataaacaatagacagagaaagtttagaaatatttagccactcaaaaataagataaagcattctaaggactaaatggctagaccacaatgtggtgagcggaacttctggaaccttctagattcagagtccaaaaataggcagggagaattaagagtccagctttttcaagatatccaagattcaatgtattccacataagacaagagacatgaactaaggtcaccacatgacctgaggcaacagttaagcccccaaagaaagctgaaaataatccatcacctccacctagagccagagcttttatggggtcatgcacctagagaggcaagagggagaaaactcatttttaggctcagttttaggacttgtcttactctctactatcaccatggcacaggaactcggagctgccaataataaaatctaattcaagactgagatcacctagggtgtggtacagtaactacaaataagtaagacagggagagtgagcacagagatgggattaagaatctctcattcaagatgagtctgaaaagagaaattccagaacacataaagagaactaaccctactaaagagatctcataaacttaataatcaggataaatttactccagaggaaataaaaataataaagcaacctgaaaaggacttcaataagtttagaatcctaaaagaaggaatggcatccattccaaaaggaagagaagcagaagggataatcaatgactcacagtggaaggcagctggaaccacaccagctaccagctgtcaggctgagaacttctctttttcccaattgttcaagtttgttctctgttcacaccctaaataaattaatactggtgggacacccacatcttgaattgatctggttcatctctgttacaatatttcgagtgctcagagtctaggctccattcacacatcagaaaagcagcaagaaatcacgtggtttcaacacttcccactaggagagaggctcctcctggccattttcagcttccatttttcagtcaaccttccttttttcttagccacagtcataatgagctccgctactctgtggtagctacattttcacagcaataaaacacagcgaaggaacccaaacataaaagacggtggtgctttgttccgggaaacaatgattacccaaccttagggaaagtgattgataatggagcaattcccttctgtcttctgagatggtctggatggcataacatttattgttgcctttctcaagtaaagcagatcataatgtagtcccacactggttgcttgagagaactgcagcctcttcagcatgtcccacatgggggaatccctggaggtcttaaggggatgggatgggtgtactaatcaaaatacctggctgctgacctcagagaccaacatgccccaaggtaaactaaggcagcaatagctcagagaatttgagaacaagagacatttgaaataggggttagattatgggttctgaggtcaaattgcctaaatacaaatgggagctctccttaaatgtgaccttggacaagctgcctggcctctctgcactctctgtgacttaaggaggtaaaagctgcaaccctagcagatgttgtgaggattcaaggacatcaatctcacggaacacagagcacatcttactgcacagggtcaaggctcaaacaagtggccccttccctcctgaaggcattgcaatgactgcctgcctcttccacgttctgccaccacacagccacctggttcatgccatccgcctctctctgcatcgcatttaggaagagtgaattgcaagaaaggagcacagggaagataaacaaggctggtctttcacccaattttctggtggttatagaaatgcttacatctatttattttatttatattccatctcagtgattcaaggtcagttgcttatcctgatgaaatgaaatcagtcttttcaggaaaaaagctcaggatctaaatcctgtccaggaaacaccaacccatgatatcccaatgcaaagggagagaaacatcttcgtctctttccaatgtagcttcccaaattggtccaagcgtgaacaggcacttcagataccacttactatactgggcacaccctaccctaaaaaagccagtccagcactctggaaagccaaggagggcagatcacctgaggtcaggagttcaagaccagcctggtcatggtgaaaccccgcctctactaaaaacacacacacacacaaaaattagccaggcgtggtggtgggcacctgtaatcccagctactcaggaggctgaggcaggagaatcacttgaacccgggaggcagaggttgcagtgagctgagatcacgccattgtactccagcctgggcaacaagagtgaaactccatctcaaaaaaaaaaaaaaaaaaaaaagccagtcacagggagatctacttgaaactaacgaccccctacctcacacttcaagaatcacaaaaaacttagccaagtgccaaagcccttcctaccatgatggtaaaggaaacccattcagtgacacagacagccaggtaaaggcacaaagaaaacagcaaaggtaccagcttgagccttctcatactatgagactttatttgccagattatgagcatcccacgttgtccatgcttaccctgaagaagcccagaggtgggcatggggacgtgtggttccacaagcagctcagcagggaagccggcattggtccccactgtcccctgcagtggcaggcatggataccaccctgacatgcatgtgtttgcaggccttgggggggaaatcagaaaatgcctacctctcacccttctgatcctgtgaagatgctgaaaggcaagatggcttaacctggaaggcctcataactgaccctgtgtgctaccagagctgtccacacagggaggtggacactaccccaatcaaatcaagcctttctgaatcaatcagcaccactgaagaaattttgcaggaataccaagaaatgcagatcacctatgtgctggttgcacgcttgagatcagaaggcctccaaatgtgggcctggaatcgcaacacaacaaaacgagagtcccccagcagccggcaccagtggcactagccgtgacagttcccaggaggaggaagaggaggattgggggtgtggggggtctaatataatctgacactctgattaacaagcttttctacagcctagggggaggcaccagcacgtcagtcagatcacacaaacgcacgcgtggtcccacaccacaatgtaactgacacacttgctgggttcccccatagtggggctttgacgctgttgagtactgaccacatctgagtgctagtggtcgagtgtgatgcctcatgccccctgcctagtgacaggaagcccatgactcccacactgctgggaccctgacggggagaactttctgagctccagctgtaggcaccacccccgtcttagctttgtgacctgaaataacaattgtgaaaagagaaaacccagcttccagatatcttcttgcttcttcagaaatgtaatggctttttttccagggaaggacatgtaagcattgcaatggaatcgtttcagtctctaatcctttgaggttaaagccacacaaaagagggtttagggtttcccagccagtggatgccctcatgagacagagcctaccctgtaagaatcaaaacacacagtctgtggaatttaattgtctgcagccacaaaaaggaagggcacttccttacctccacttatgcccatcagagcattctgggattggatgtgaggactcctagggccacatgtccctgaaatccccctcccagggcagctacagaacgtgccagttaaggagatattttaatccattaatatccactaacacattaaacaggaatagccttatttgattttctagctgctgtgttgcaaaatcatgggcaaaaagtgaattctaatgaggatgagggaggaaggaaaagggccaaggcaagcctttcaaacgccactgcccacagggagagccgtgtaacacactcagtggacagggccagaggtgctagaggttcggggaacatggcaaccggccagcccaggccccagtcttagagggcagctgcgaccctgtccctcctgcgggtgccacgtggggacgggaactggccctgacagctgtctgtgtctttaggagctgggacactgggtttccatccaaaacatccctgtttggatatggtggctactaactcaaaacacacataccatgggctccttcccaaaatagacacatctacaggcggaattcgacttcaaggcggggcgctgcgtaaaagcagctggacttgtgcagagtccaagtgcaggtggggtgaggggaggtgcagggagccccagggaggcacggacttcctgtgcgcagggagaggaggaggaggtgggtttccacggaggatggcccacagtgcctgaggctgtctccctgcctgctgtggactgaattgcatctccccaaattcgtactttgaagccctagcccccagggtgactctatttggagatgggactcttaggaggtaaggaaggttacatgaggtcatgagatcctaatccaacagggaccggggctttctaagaggaggacgatctcggtctcgctgcctgcctctctttccccctctctctcagtctcactctgcctcggttttagtttttctttctgcctctatgtctatctctctgttcatttttctggctctgtctctatgtctctctgcctctctgtctctgtctccacgtctctgtttctctgcttcttctgtctctcccagtctcactctgcctctctctctctctctgcctccatgtctgtctgtgtctctgtttctctgcctctctgtctctatttctctgtgttggggggggtttctctgcctccatctctctctgtcccctacccactacctggccgtgtgaggacacagtgagaaaacagccatctgcaagtcaagaagcggctcgcaccaggaaccgaatcagccagcaccttggtcttagacttccagcctccaggactgagagagaggagagctctgtcatttaagctgcccggtctgtgggatcctgctatggcagcctgagctagtgtatagcctctgctaaagcaacgagacatggacaggagccttcacagtgtctcccgaggcagctcaagggctcgtcaaggaagaaactgggtcttctgaagacacccccttccccatcaggagctccagttaaatccccatttcaatggacaaggtggccgcttctctgggggagaaactgacaagagaaaggaaaaagcacgttctttcaataaacttgtcaattttattcatttcaataatccctccaccaccaccactgagtgtgtatgtgtcagtaccgggctcagcagggggccctgagtgagtgggtgaggagcaccctctgcccccagccttgtgggtgcagcagacagcgcagggcattctgggttgagatgtcaggaacgccagttgctatggggagaggtgagaggaattctcggtatctcctgatacaggtctggtctcagaggtggggaagagggtccacccagcacaaatacataacaaaggcatgtaagggcacagcaaggtctctggctctcaggatctggtatccacgctacaggattcaaaaccatgaacatccaatctcctggccacactggacaggccccagcaagatgcttcctcgcagcctctgctctgctggcctcaaagaggttgcctccagatgccggggtggtgctcccagccctggagatggacactgctcctgagtagggcaggatttggacacgggaagctcctcagtgagagtggacatggtaattaacccaccacgtctttctgatcacatgaatgcaattaattcttgtgtaaatgagatgcaacctcccaagagtacagaagcttcttctctgctcttctttgtcctctacctgtggttccagaggcatgagccaggccagattcccagtggcctcaagcagagccgagccaggccagattcccggtggcctcaagcagagcccagccaggctgcagtgagcaggggatacacctcatgagtgaccagccccatgcacagacccacagtggagaggacacaccacatgcagagagctacagacagctgggctctggctggacaggcactgggggtagcagacgtgaagaggcaagaagggttgggtggcgaggacttcatgaacctcactgaggagtttgtactttatttagaatgaaatgcagaagctgtcaaaggtgtttaagtgaaataatagaaaaataatatctgcacttgggaaatactgtcctgggtgttaaggggattgaagaagggtcaggctggagtcaaagagaccaatttgcactcatttaggggacaagtgccagtggccagaattgagattatggcagcagaaagcagaaagaggaaggcgggtacaggagttattaaagcaagtgaaatagcatggcttggtgacgagaaaagaaggtgccacattctggcttggggctgcagaggcagggaggagggagaaagtgcaggtttaagggatggggcacgttcggttgcgctggggcttggtgagtgtgagaccccacgtgaggcccggtgggaatgctcaggggacaggtccccacatggcccagagctcaggaaggagagcctgacccagacccagatgtgaaagttgcactgataccgacaccactttgagtcacaggaggggaggagctctcagcaagattaaggagcaggagacagagctgggagaagcccaagcatcacaaatgggcatgagccgttcctgtagagtgcagggcagaagcaatgggaagccagctccaggcttttctaggagctgagtgaccagagccttgagagtggggaccggcaggtcagctactgcccagaagccaagcagcattgcgggcatctccgtgacctccaggagaggctctggtgatgggataagcagagggcagcatcaatgggtgggagataaagaggaagagggaggagatgcttttttgcagagtgctgggtgagaagaggcgcagagagacaaggtcatgcttagagcctcctaggggcatggatgactaaggaaggtagagaatgccctggaggcagtcacagagtcagtaactcctccttcctcccacaggcgagtggaatgtgggtagctgccgggaacagcagccctccaggaagcccagtcaaggctgagggtggtaacgttcatgggggcattggcaggtgcagatggacacatggggaaggcatgagggcagcagagagaaggacggggcacttggggatgagatcgtatggggggagatgacccaaggggctcatgttggatgatgcagcagctttgatcccctgggcttctacgctgggccaagaaccaacataagctctttgctttcctcctcttctttgtgaaatctcatccagtcctctcagcactgccatgtggcagacattcttgctatcctgcttgtcaagggaagaaattcaagctcaaggaggttaagtaactgagcgagcagcctcccccgagcatgtggaggggtgggactcaagcccgggctgtgcagctgtcaggtttgagaccccctcctccctgccccaatttgcctcttattctcctgaggaagagcatcatccagccactcccttggtcccaaggcccagaggaaggttcagaaatgcctccagttggcaggggtggggggttctggaaagcctggggtatcttcccttgcactagagactacagatacagtcttgggggcctacaaaaatatttcctggtatttttagttccatgaaatctaaaagaatatataaaggaacaattttgtaccctattcaggacgaaagccaacatctacatttgggtttgtgggccctcctgtgccggcctgaagaatcaccgtattgactgtcctgagatgctgaaagacaatgaaaggtaactccaatggtgcttttgtgctcgatgaaagccagatgacttctacaggctcaggcatcaaagatcttgcaagagtttgaaagagatcagtggtaggaattgagtcaacttccagccaactgtacaaaggcattaactttacttataagaggaaatgtgatttaagttaaatatcatatgacacattaagtcacagcgagtttgggttttgaattttattggtgtcttaaagttgtttctctttgatctgctcattcattttggccttatgttttagaaaagccataaaaattttataaccagttttatctctggacacatgtaattacattatgaattataaatatataaccatattatgctcaaacatagactatatagttataatatacaagtctggtagaataatattatataagaatgatgtaattatcaattataataacgtaaaataaaaataatctaagtcaacactggagtgtgcttggtaatattttttctttctgaaaaggcttcataagtggttctagcctaaaggcatgggtgggagagtaaagtgaaggaagggaagggaagaaaagccgctggtgggaagcctggagagggagcctgaactaaggagagaaggagaaaccacagggtggaaggcgagtggttgctgctgtccagggtcctgatggtcactgagccctactcccgcccgccccttgaggttaaggccgagggcagtcagctaagtcatcccagggtgtggagggaccgttgggacttggaggacctgggtttgaagcctatcctaacactgaccagatgtaatttggggaaaattattaagcctaagtattcttggcaatttaaatgagataattcatataaatgtattcttcaagtcgtaaaggacaatttgaatgtgaaatactatgctaataaagggactggcactaaaacaattgcttctggtttcccagtgtcgggggagggttctgggggaggctggagagagcaactccaaacttctcagttcccttctattttcagaaatttgcttcaaccatgactgatacatgctattcctgatctgtttgatatttcagcattgcacatatgccaataatgcaattgcagggaagcacatggtgctatttaaaaactgtgttcctaacacaagttagagacaagctcaagtggaaaaatataatacatgaagcagattctcaggtgagtttatgacatttacattcaccttttaaataaggcttctctcagcttctgcacagcaaaagaaactatcatcagagcaaacagacaacctgcagaatgggaggaaatttttgcaatctatccatttgacacgagtctgatatccagaatctacaaggaacttaaacagacttacaagagaaaaaaaaaaaaacattaaaaagtgggcaaagaacatgaacagaaacttctcaaaagaagacatttatgtggccaacaaacatatgcaaaaaagctcaacatcactgatcattacagaaatgcaaattaaaaccacaatgagataccatctcataacagtcagaatggcgattactaaaaagtcagtcaagaaacaacagatgctagcaaggctgtggagaaatacaaacacttttacactgttgatggggatgtaaattagttcaactgttgtggaagacagtgtgatgattccttgaagacctagaaccagaaatatcatttgacccagcaatctcattactggttatatacccaaagaaatataaatcattctattataaagatacatgcaagcatatgttcactgcagcaccattcacaatagcaaagacatggaatcaacccaaatgcccatcagtgatagacttgataaagaaaacatggtacgtatacaccatggaatactatgcagccataaaaaggaatgagatcatgtcctttgcagggacatggatggagctggaagccattatcttcagtaaattaatgcaggaacaaaaaactaaacaccacatgttctcacttagaagtgggagctgaatgatgagaagagaacacatggacatagggaggggaacaacacacactggggcctgttggaggttgagggtaggggaagggagagaatcaggaaaaatagctaatgcatgctgggcttaatacctaggtgatgagttgataggtgcagcaaaccaccatggcacatgtttacctatgtaacaaacctgcatgtcctgcacatgtaccccataacttaaaataaaaatgtctctcaataattgtacttcatcaacttacatgtatctgcaatgcatactctgacttccaagtggaaaagaaacatagttaaatttatatttgcttcatattggtcagtataatcagaacacaggcagccccaaagggaactcttttctaccaaaacaatggggttgaacttaggagagaacaattatgccacacagctgaggaggtcaaaaatgggaaccctcatatatttccagtggagatgtaaaatggtgcagccactgcagaaaacagtttagtggttccctaaaaagttcaacagactcactacattacccagcaattcactcccaggcttatgcccagagcattggaaacaggtattcaaatacttatatacaaatgtcacggcagcattattcataataaccaaaattcagaaacaacccaagtgtcgattgatggatgaatggataagccaaatgtggtctgtccataaagtggaagattcttcagcctacagaaggaatgacgtgctgattcacaccacaacagggatgaacctcaaaaaatgacatgctgattcatgccacaacagggatgaacctcaaaaaatgacatgctgattcatgccacaacaggaatgaacctcaaaaaatgacatgctgattcacgctacaacagggatgaacctcagaatgacatcctgattcacgctacaacagggatgaacctcaaaaacatcacactaggtagacaaagccagacacaaatgttcacatgtatgattccacatacatgagatattcaagataggcaaatctgcagagacagaaagcagattcgtggctgtcagggctggaaggaggaaggaaagaggaggggctacctggctggtacagggtttcctttgggatgatgaagatgttttggaactagatagaggtgatggccacacaatgttgcaaatgtactaaatgccactgaattgttcactataaatggttaattttatgttatgtcaattttacgtcaatttctttttaaaagataccacccaacctcccagcaaaagagtctgaagggctataaggcatcagtccccaacattttgggcaccagtgaccagcttcacggaagacaagttttccacagactggggtggggggaatggttttgggatgaaacttctatctcagatcatcaggcattaggttctcataaggagtgtgcaaactagatccctcacatgtgcagttcactctcctatgagaatcttatgccgccgctgatctgatagaaggcagagctcaagcgatcatgcttattcgcctgctgttcacctcctgctgtgcagcccagttcctaacaggccacagacctgtgctggtccatggcccaggggttggtgacccacactataagggaaaagagacaaacctatatcccaacagtatgtttccctgggtgtctcctgttgaaagaatctcacctgagtgccactctggtgtgtaaggacatccattcttgggacagtggaacctctaaacacaaccagccactgcatttggttctctaccaatcaacaacaatctgcgccaatactagagggaaaacttcgccaggggaacttaccgagacttgatatgttcaatatggctccttccctagggatttgcaagggtaatttttttctatatgtgattttggtataatgtgttgactttagaactaaacccctgcacaaaatgtgactctaccaaatgcttgttcagactatacaatgcatagtaatttataagctattttcccctaactcccaaaaaatgacttaagaatgcttatactaaaaatatttatacaataaggcagctaagaataacaatttttaaaagaaaaaggggacaatatatagaaaaccttataccaggaaatcacataaaaagggtttttacctattgactgaacattacatttatgctctgagcttgccagctgctagtgcctgagggaaaacctatcaattataactttattaacatgaaggatgtgcctcctaggattctgccacaaatgacaaagcaatgaaaaatatttgattgcctttttttaaaaaatcacttgctttttcaagagctgatttatgagaactgctgcaatatggtactgctccctaaagagcttctgtcttctcaccttctccttccaacctaggggtttttcttcaccacacttcaaattcttgagcaaggccacattcagttatatgagcaactgaaactggtggttctgcaagctggtccatggtgcagattcaggctgtgaacttggacaaattgagcagctcttcatgttgcctgctcattcaagatgaccatgcttctctccccaaggactgatcactttgattgatgaccgattgaatttgccttatgtacagggtgactcagagacctccaagtattagaaaatgtgtccttagtttagatccaaatctatcttctgctcatcaagtgatatatctatggccatagaaatcagacaaaattcctttccagatggattttttcagatatttttgttaacttgttaaattgaggtaaaacatacatgaaatgcacaaatcataggtgtacaactccattaacgtttacaaagtacacatacctgtataaccatgacccagatgaagaagtaggacattcgctgccacctcaaaacctctcccctgcctcctcccagctgagagtccccaaaaggtaaccactgttctgatttctagtcccatgcatgtgttttgcctgtttttctattctatgtaaatgtaataaaatatagatttttaatgtctggatatttatctcaacattttatctaggacgcacccacatctgtgaaatagcagcccttcattactgtgtagtatcctcttgtataaataatctgagatttatctatttatgttcaactattattaaacattaggatgattccagtttgagaccattaaaaataatgctgcaaagaacattcttgagcacgttttcttggaggcacatgtacatgtttctcataattactcacctaggaatagaacagtggtgcctgcagaggtatgaacagagcaaagttcacccatgtcatagattttgtcttctaaaagccaaatggtggtgctttcagagattctagtaggtgtcccttccatgagagtcaaaacccagatgcctctaggagttacgtctaatgagatgcgtatgtttagcctctaggagttacgtctaatgagatgcgtatgtttagcctctaggagttacgtctaatgagatgcgtatgtttagcctctaggaggtacgtctaatgagatgcgtatgtttagcctctaggaggtacgtctaatgagatgcgtatgtttagcctctaggagggacgtctaatgagatgcgtatgtttagcctctaggaggtacgtctaatgagatgcgtatgtttagcctctaggagggacgtctaatgagatgcgtgtgtgtagcctctaggagttacgtctaatgagatgcgtgtgtttagcctctaggaggtacgtctaatgagatgcgtgtgtgtagcctctaggagttacgtctaatgagatgcgtgtgtttagcctctaggaggtacgtctaatgagatgcgtatgtttagcctctaggaggtacatctaatgagatgcgtgtgtttagcctctaggaggtacgtctaatgagatgcgtgtgtgtagcctctaggagttacgtctaatgagatgcgtgtgtttagcctctaggagttacgtctaatgagatgcgtgtgttcagcctctaggagggacgtctaatgagatgcgtgtgttcagcctctaggagttacgtctaatgagatgcgtgtgttcagcctctaggagttacgtctaatgagatgcgtgtgtgtagcctctaggagttacgtctaatgagatgcgtatgtttagcctctaggagttacgtctaatgagatgcgtatgcttagcctctaggaggtacgtctaatgagatgcatgtgttcagcctctaggagggacgtctaatgagatgcgtgtgttcagcctctaggagttacgtctaatgagatgtgtgtgttcagcctctaggagttacatctaatgagatgcgtgtgttcagcctctaggagttacgtctaatgagatgcgtgtgtgtagcctctaggagttacgtctaatgagatgcgtgtgtttagcctctaggagggacgtctaatgagatgcgtatgtttagcctctaggagttacgtctaatgagatgcgtgtgtttagcctctaggagggacgtctaatgagatgcgtgtgtgtagcctctaggagttacgtctaatgagatgcgtatgtttagcctctaggatggacgtctaatgagatgcgtgtgtgtagcctctaggagttacatctaatgagatgcgtatgtttagcctctaggagggacatctaatgagatgcgtgtgtttagcctctaggagggacgtctaatgagatgcgtgtgtttagcctctaggagttacgtctaatgagatgcgtgtgtttagcctctaggagttacgtctaatgagatgcatgtgtttagcttttgctaaatagcttttagaaaagtggggagtgtcaaaagaagacatacaaatggccagcaggtatacgaaaaaatgcccatcatcactaatcagagaaatgcaaactaaaaccacaatgagatatcttcttaccccagtcagaatggctatgatgaaaaagtcaaaaaataacagatactggcaaggatatggacaaaagggaactcttacacactgatttggaatataaattagtataacctttacagaaaacactatggatgtttcccaaggaacaaaaaatagaacaattaataccattccatccagtaattccactactggtatccacccaaaggaaaacaaatcattgtatcaaaaagacacctgcgctcatgtgttcaccataacactattcacaatagcaaagctagagaatcaacctaaatgtccatcagtggataattggataaagaaaatatggtatacatacaccatgaaatactgtccagccataaaaagaatgaaattatgtcttttacagcaacatggatgaaactagaggccattatcttaagtgaaacaactcagaaagtcaaatactgcatgttctcagtcacaagtaggagctaaacagtgtctccacgtggacacagaaagtggaatgataggctgggtgcggtggctcatgcctgtaatcccagcactttgggaggctgaggcaggcagatcacttgaggttaggagttcgagaccagcctggccaacatggtgaaaccccatctctgctaaaaatacaaaaattagccaggcatggtggtgcatatctgtaatcccagctactctggaggctgaagcaggataatcgcttgaacacagaaggcagaggttgcagtgagcagagatcacacccctgcacttcagcctggatgacagagcaaaactccatcttaaaaaaaaaaaaaaaaagagagagagagtagaatgatagacactggaaccttagaagggtggtgggagggagtgggaggtggtgggaggggagtggaagggggtgggaggggtggatgatgaaaaattacttaatgggtatgatgtataatattctagtgatggttggctgggtgcagtggctcacgcctgtaatcccagcactttgggaggccgaggtgggaggaccacgaggtcaggagatccagaccatcctgaccaacatggtgaaactccatctctagtaaaacaagaaaaaaaaaaattctggttatgctagaagctcaggcttcactacacaatatatccatgtagcaaaactgcacttgtaccccttaaatatatgcaaatgtagcgggaagtgtgagagtccccatggctttgtatcttcaccaactttggtgctgtcaatccttctctatggaagccatcctggtgtggcacagtggtgcctgcagaggcatgaacatagctaagttcacccatgtcatagattctgtccttgaaaagccacatggtggtgatttcagagattccggcaggtatcacttccatgagagtccaaacccagacacctctaggagttacgtctaagcaaagcagcctggctgaagatcatccatggtggttaggattggcacaaagaggagagtgtctatctgtctaggaaacggtctatcactcagctccagctagctgtggtccatgaggaacatgggccaccactattggggccactattatttttgaagtgaaaccaaatcaatatttttatgtaaaacatccccacctgacgatgctggtgactaaggaaagcctgtctgaagcccacttgaggttcaccggctgccctttagcaagctcacgtcagacctttgctgacctctgatcgctggccggctccctcagcaagggctccggagtgtttcagcttcccccttagtgagcagctgctgctctgttctctggggctgatgaatttatgataatgctttgaaaaaagaaccttaatcagctgggtgcagtggctcacgctcctaatcccagtgctttgggagtccgagatgggagaatcacataaggccaggagtttgaggccaggctgggcaacatagcaaaacccagtctcaactaaaaaattaaaaaaaaaaattgtttttaattagcagggcatggtggcacacatctgcagtcccagtacccaagaggctgaggcaggaggatcgcttgagcccaggaggtcaaggctgcagtgagccaagatcatgcctctgcacttcagcctgggcaagcaacagaatgagactttgtctctaaaaataataatattaataacaacactgcacaagtactaatctaagcaccattgcatagactaactcatttaatccttgcaacaagcctgtaaaacacagctctctctatatatatacacatagatatacatacatatacacatatacatatatacacatatatatacacatatacatatatatacacatatacatatacatatatatacatatatatacatatatatatatatatatatatatatatatatatatatatatatacacatatttttttgagccagggtcttgctctgtcactcaggctggagtgcagtggtacaatttcagctcactacagcctcaacctcctgggctcaggtgatcctcctgtctcaggccctccaagtagctgggactacaggtatgcaccaccatatccgctgattttttgttgttgttgtattttttgtagagacggggtttcaccaagttgcccaggctgggctcgaactcctgagctcaagcaatctctccgcctcggcttcccaaagtgctggcattacaggcgtgagccatcacgcccagttgcagcattatttttattccccattttatgggtggaaaaaaaaggagacaaaaggcatttaagtaatagtgtgggtggtatgtacaaaaatgagagagagagagagaaacagagacagataggcaggcggagctgggggacaggttcttacccataaacataaatataattttgggttaacagacatcatcccctggttatccctggcctcctgaaatgcccatgacccccagaataggtcgacactgttaatctctgtgcttaacactgactggctgaatttattccaaaataatccagcctcaagaatgaagaccaagctctcgctggattttacaaatccccctccggtaatggtttccaaaaggtctttagaatcctttattcgcatcaaaaaatttcaccgtcataccccaactgcacgatagtatctagacttccacttacttccgccatagtcaacccctgggcacttacagattggccgacttctgcaataatctattccccaaccaactggaccttggagtatagaagttgttgcaggtccctgctgtccaatatggtggccaccagccatgtctggctatttaattttaagtttaatttaagtcaaataaaatcccagtatgtagagcttaatttccttctctcaactgtgggctggacttggtgacttgcttcctaaagtgagatgagaggaacagcaactttgcagataccaccttcaccaggtgaccgtggttgacagcaccagcagtaagtcacaatgataccgtgaagcccctgatatggcatgatggggaggacacttctcctctggggtactttttccaaaaacctagaaccccattctaatcacaggaaaacacaagacaaccccaaattgggagatattctgtaacatatctggccagtactgttaaaaagtaccaaggtacaataaacaaggagggactgagaaactctcacaaatcttagtaagaaaactctcattaaggaggcatgagggccagatgcagtgtggtgtcttggatggggttccagggcagaacaatgatgccaccagggccacttacaccccagctcttcctaaacacagcatcgactgcagctgtgcacctgcaaatgctagggttggttccacagaatgcatttcaagcagacacgaggccatagttttgcttattggctttacgccaaaagttttgccttctgcctctgtagctgacgctcataagactgaaatttattttcatgaaacccattttgccactggcagcgtaagacagggaggaggtctgggaaagaagatagctccatcaccctacggtacaaggcaaacagatgcagggcaggaccttggaggcctcccagaacccccacatgtttgccatattgccattagcaaacgacttaacctctttgaagtctcacttccctctcctgtagaagtgagtatcctgacccatacctctgtggggtcatcgggaaggttaaaataaccagcctatgcgaaagatccgggtgcatattagaaggaaaacgaaagtgagtttctgttcacctcatgcagaattctcagtccaggttgtacatatacggtacatctcaaattgcaaaggaaactctcgtcctatcataaattcatcagccccagagaacacagcaatacatcctgattgcttttcatgggaggaaatgagtttgcctatctgcctagcatggagaagtcattagagaggctatgtcagcgctcaggtctaagctcagatcatgtttgaaattgcccctttggctggactcagggtgaaatgactgctaattataagcacacttgctcttgctgtctccctccagatggaaggatagaattgtcaacaaatttgctgtttccattttattcacacaggatcactagactccaaaaactgacaaaagcaaaatgcaggtcagtagaacccctcagtgtggaaaaaacaaatagggcctcatgcagtcctcagtgtggcaggaaggagatgatccaagatggcagctcgtgactgcatttgaccgtggagatgttttacggggccccaagttactgaatagtgtcattaggacatttaaaaaatagaaaatttaatataaaaatgaaagaatataaataatattttaaagtgcattcttctttctatatattctcccaaaagctcttcacagtggaaaaaaaaatcagaaaatttggcgatcttgggtctgcatttccacagtcacaattagccgtaaacgtccgtatgtttgtccttggtcctcactgcccttactcatttctgggatccctcagaaacctcaattcagtgaagtgagatgatttaagaaagatcacacagagaatccccgaatccactcaacactcctccagcacccagccacccgcccacctatgcatacaaatggccctgcatttacattaattcacaccgtcaagaaaagcctccctccccgtgccaccctgcatgccagagtctgcacacttcagctcttgaacctctgagctataataagcaagtatgttttctgaaatggcaaaatgggttttatagcatttgcatcaatagagcgagtcacgagcattacagagctgctgccaggcctgggcagcagagaaccaaatacagcctgcttcccaaccgacttcacatgctctcccagagaggcttgagagtcatgggcagtgacaaacgtggcttcctgcccccactcttccctccccgtattgcctggggatcgggtggtggcccatctccatgcatttctagcaccaggcaaggtgggaggaagcagggtggtcgagagctgggcagggtgggcctgagggtgctaagggtggtaaaactgcagggcatgtccacggctctgcagagctcctggggctgtcgatgatcttcagtggctttctagaccacgcttcagaaaatatggcctgcaggccacatccagcttgccccttttaaataaagttttattggaacacacccatattcattcatttccaaaaatccctatcatcagtgagctttgggggagaatatatacatacatatatatttttacaatttgtgtataatgtttatattacttgtttccttatttccctacatacatgtattatataacagtgtcagtgaatgcatacataaaatatactatgtttatataatatatataacatgtaaagaacagtgtcagtgaatgggatgtaggaatatgaaggaggaaacaaatgtagagatttctagaaaatgtgatcaaagaaggtgatgtctgagcaaagatgtgaaggaagtaagagtgtgagtgctgtgggcacctcgagggaggagctccaggcagagggagcagcacccacaaacatggtaacgtggagcaagctggggagagggcatcatggcaaatgcagttgatgaggtggccaggtgtaggatatggcaaatgcagtcgatggggtggccaggtgtaggatatggcaaatgcagtcgatgaggtggccaggtgtaggatatggcaaatgcagtcgatgaggtggccaggtgtaggatatggcaaatgcagtcgatgaggtggccaggtgtaggctatggcaaatgcagtcgatgaggtggccaggtgtaggatatggcaaatgcagtccatgaagtggccaggtgtaggatatggcaaatgcagtccatgaggtggccaggtgtaggatatggcaaatgcagtcgatgaggtggccaggtgtaggatatggcaaatgcagtagatgaggtggcgaggtgtaggctatggcaaatgcagtagatgaggtggccaggtgtaggatatggcaaatgcagtagatgaggtggccaggtgtaggatatggcaaatgcagtcgatgaggtggccaggtgtaggatatggcaaatgcagtagatgaggtggccaggtgtaggatatggcaaatgcagtcgatgaggtggccaggtgtaggatatggcaaatgcagtcgatgaggtggccaggtgtaggctatggcaggaacttgggttttgatcaaaagttgatggaaaccagtgcagggctgagagcaagagagtagctttcatccaatgtgtgctttgaaaggatggccttgggaagaggatggataggaagatgggttgccagtggatgagaagggcactgggcagactcatgggtaggctggtgtggttggctgagacagacaaaggcaggtgaattaaggaatcgcacacaagaaaggaggtgagcagggaccagttttgaaatcaccccagttgtcctgtagaactgacgtttatggattctttgaaaaaacttagaaaatgatcctcccagtcttgaaacttgagaaagttgcatttgtcttatctgagtttctttctcaggaaaccgaccatcagacctcccagatagcatcatggaactgaaactcaccaggtcaccgcatctggacagtgactcaccagaaccttcgcccgtcatgactgcctaagggaccaactgcttcctgctgaccaactccctgcctaattcctgttttccccacacatggctaaatttcttcctgttatgtaaacccctagtattagttggtcagggagatggacttgagactgatctcccatcttcttggctgcagcacccgattaaacacttcttccctggcaatactgacggtctcagtgagtggctttctgcgtggtgagcagtaggacctagaccaagcccctggcatttcagtaacagtttctgggtatttcaaggggatttgatgatgggtttcatgtgggggtgagagcaaggaaggagttccaagtttttgttctgagaagtgcagtggtgttgacaatccacagagatggaaccagagaggcttggagggctaccaagagctgagatgaacactcttggcttgctaacatcggctatcacaggatggaagaggaggagtgatagccctgctccatccagagcaagaggccactgcagggccacagagttcacactcatcattaaaatcaaaagaaaatgagcagagcacactgcactcctgggcaatctctgtctatggagcaggcatcctcctgtctctcatcttcttccctcacttcccctgccctgaaactctgagattagagatctttcttcaggttagctacactctacatggacgcttgctttctgtgatcacagagggatccctctaggattctttccttatagtaattcttagtggtgtctacaggtcactgctttctctccagtctgatgctgaggcattttggaatgtttcttcctcttacaccaaaataaatgaaggcaacttgtggatgatattgagtgaagatcacggaatgattcattatttaactgcaaatgctgaaaacacagctgtactcactgggcctaagaaagtgacttccttcctctcattgaatatagatgtttactcatcagcttattttaaaatgtgatctcaatgccatgccaatgaaagccttttagtctatgatttctttgccaagggaaattggaaatgttttctttgaaatgttctaatgcaggcatcatctggccatggagttgagactgttatcaggagcaacagctgaacagcaccagaagcaacatttacgtcacagcttccaggtgccgagccatgctgcagacactgtatttgtattgttgtgttcattccactcatctaatatatgtttgttgaacactttctaggtgtactagctcatgggatgcctttatgtaaactaagcagaggttctcttctgagcaagctaatgcccccttggcagacctagccattgggctgagtgttggcaaggtgacttttggcacaaccatactcaggggctctaagtggaggcatcgcctcagaactgggggtacagcaaaaaccacagaaggcaaaacccctatcatagaactcacatccttattgggaaaatgtggatggaaatgtggtatgtcaggtaaaaatatgttctatgaagaagacaagatgaagtaagcacaaagagagaggggaaaggatgctggctaggaaattttagagcagaggccttaatgatgtgaaagaatggcagaggggctggggcatgcaaaggccccaaggaaagcaagtgcttggggttttggagaagcagcaggaagtgactgcagtcttgtagggaagatagatgggtgagaggacccctacatatgcacattttccataggacatcaaatctagtctacaatactcttgttaagttcaaaccagcactatcagttctctccttcccctagaatctgagatgagtttttatcacagattatctgttgcatcctctgcctttgaaaacacacataatcctgctgcagaaaaaagaaacagccaatcaaatttgagaagagggtgggagatgagggagagttcctgaacttcacagttttgaagaactattaaaggaataatcttgtacttatcgaaaatgatttgctctgcatgacaatactattctaatatccatagtcaaggaaggagaacacagaggccagcagcccaacaagacacatacagtcatcagtgtccttgtgactctagatgcaatctgccttaaccaagacaattcaacctccgggaaaatgaattccattcagtgggaccccaagttttccatggcaaatgggaaaaacattctttctgttgtaaataggaacacaacttgtttatgaggatgctttaaaaaatagaaagtcatggtctacatttccattgttcctcattcatccattaacacaacatttctgtggatcttgtgagttggttgctggacaaatctgtggggttggagggttgctgactagtgggtacataatttctccaaatgaggctgattccatttgcccttcccgtctctcagggttggatgatgaactgagaaggtatgtgcttgtagttcccacatttatctttcaatattctgccctaatgaggctgtcaggctaaacgcctttccagaaagatgactctaactttcttctccatggacagtgtacttgaatggcatttcctcacacccttgtcaacatcagcattagcattctttaaactattgattttataggcaaaatccccattatcttactatttgaattggtttgtagcccttgacatttttcatacactgattagccatgtgcccccaaatatggccacttctttggtaatcattatctcatgttctgggaaaaacacattctaaaaagtttaaattacttgtttgaaaaaggaaatgggagttgtcattctagttcagaaaagattctagcccataccaaccgtattgctgcagaaaaactcaggccagcagaaaacagaaagggtaggtagaccagcaggctgaagaggcagtgagcttggggactcaaagctcttctccaaagatgagccctatagattgggaaatatgaagatgcctcacgaggaattggccgtagagagtgatgagggccacctctttttgctaaaaggaagatttcttccattcccccagttctacaggaacccaacgagacagcacaatgacaccacatgaatttggccacatcatgaaaattaagttgggtgcaccaggtggaaaaaaaaaaaaaagttctttcacctataagagtttcaggcactgctgcatcttgccagtcagctaaatgttttccttactgccaatttaacagcaatttaagtcattttatgcctcttgagctttggaaacctgtcctgctaggcactcaggatgttgatttaatagaatgtttctcttgaaggtatttggtaggattgtcaccgttttaacctgtttttgttttcctatgcaaaccaccttatgatcactcatcttggtttctgggagacattttaattagatcccttggagaatcttacatagcctggaacctaccattcttgtctcaaacatctaagggcagtttggcctttcccctgtctctccatttatccatatcctatctgtaaggctttttgatgtccttcctcttctgtcctgacccctttcacttcctggccacacaccccaccctctcaatgtcctggaaggggaagagatgcctctgcaatatcgctctcctccccagtaggtgcttttgttaatctgttttgtctagagctgtgtttaagccatgctgcatgggaagcactctctgctgcttcctgggacaggattggtcagctggtccagggtccccctttaagcctgatcctactcattgatgctgagatacagtaagcaggacaaccagcaagactgccgtagagaagacaccactcgcctccctctctccctctccctgcttctcactccttttagcatcttagcacgctggtcatgttttacaggcctataccatagcaggcagcagagtgttataatctaagatttagatccagatgtaactggaggcctttttttttttttttttttttgagatggagtctcactccattgctcaggctggagtgcagtggcgtgatttcagctcactgcaacctttgtctcccaggttgaagtgattctcctgcctcagcctcccgagtaactgggattacaggcatgtaccaccacaccccgctatttttttagtagagatggggtttcaccatgttacccaagctagtctccaattcctgagctcaggtgatctgcctgcctccacctcccaaagaactggaggcctttatacttcaggttgcatactaagacagatggagagagtgcgggtgagagtggaaactgtagcacagtgcatcagcttctagctcttgaatatgcatctgccttgggaacatattctgaaggaagtgtctgtggcaggacaggattcaagcatttgtttttttaggcatccattgaacaaaataccaaaatctcacattcacttataaaacagtttactggtaaatctatctggggactaaattgtacctatatatcattgtttttcaagtgtttcatttggaaaattttttaaaaacaagactgtaaggtcctcaagggcagaactttctcgtcaggactccctggtacttggtacatctcgagcacaggagatgttagaatcagacgcgtaattgctgtcccaggcagcggccgctggtgacctgcagctaccgaacacatgaaatgtggctgtctcaaccaacgtgtgccctacgtgtaaagcagacaccagattttcaagattcaatgccaaaaaaatgtaaaataaggtattatgataaattataacattataaaatattgatttaaattaatttatattgatttccttttgaagtaatatttaaggtttattaggttaaatgaacatacattattcaagttcatttcacttgttttctttttactttcttgtaacgtggctgctcaaaaatgtaaaattgcattcgtgcctcacactcaaggctgacattgtatttctatcaggtgcgtccctctagaccccagccggggtaacatgaccgaggaacgagcccagttcagagccgccgtcgagtgtcacgtctggggaggagaggggagcgccgtgctaaggggcttacgcagaatcttcttcaaagctgtcaaatctccatctccgccagccatcactgctgcctctacaccagaagcacgtgagaacgtgtgggtcccatttttcatacaaatgtttaaaatatattctgtgccaataccgttcttatctagtttatgggattgtggaaaaacaaagccacaggatttagggctcatcaaaaaggacttagtttcattctcagcgcagtagggaaaaaatcttaacacagcttgggtaaagaaatgactaagagacaaacagcagtgggttttagcgtgacatatgcccctcatgggagagtcctgtccccctttgggatctcattgagcaattacaaatatcactgcttcttttttttttttttttttttgggatggagtctcactcactctgttgcccaggctggagtgcagtggcgcaatcttggctcactgcaacctctgcctcccaggttcaagtgattctcctgcctcagccacccgagtagctgggactacaggtgtccactaccacgcccagctaagttttttgtgttttttgttagttagttaattagttagctttttgagacagaatctcgctctgtcgcccaggctggagtgcagtggtgtgatctcggatcacttcaacctctgcctcccaggatcaagtgattctcctgcctcagcctccagaggagctgggattacaggtgtgtgccaccacatccacccaatttttgtatttttagtagagatggggttttgccgtgttggccaggctggtctcaaattcccggcctcaagtgatctgcccacctcagcctcccgaagtgctgggattacaggctgagccaccgtgcccagtctactgcttatttctgccaacgttcttcaaagattagaaaatatgatattgttattttccagagacaaccttcttttcatgcaaaacgaaatctcccatgtctagaagaaggccggtaaactggcagcccaccaggctgcgcgtggatgtgttagtcaacgcagtgattttcaagaactgactcatttgttttttaatttgttatctgccaatatttcaaaatcaaaacaatttacatggaaagtctggatttctgacttctgttaagttggaagcgctggcaaccctggcctatttccctgtagtttcacttgatggaatgagaggctggccctgtgagatgactcctccactgacccaccacaacccccacccactccctatcatctccccagtgctggggaggaggagggacagttgttatcattgctgttgtagttctcatatcctggaaatatttccctgtccccctacttccactgagactgtgaaaataaaatgcagactgggtaatctgtttcttatgtctgtgtcttctctattctttaaacaaaaatgcttctgtatgttttcacctaatacagcaaagctcaagacagttagggctcttttaatattgaagacaactaaaaaaaaatctttaagtgtgcatacgctcacacagaaagagttctccaagccttgagtttctttagcattacttagtgtagttggtttcctgtcccaaataatggggggaaatatcttttgggcacagttgtgcggattgtttagaaacatacatctctgattaatataaacattacctgcaacacagagcccgaaggcagcctgttttctcactatcgtattttataatctgttagacttattgccatgttaatcaaaggtctacttttcatgctaacactagctacagaaattgtctcccagcagtttccattttgaggccttgagacatcataaaaccccaaagcagcaatgctggcctggcaacagggtacagagattacatcgatccctgctgcaaaaggaaatgaaatgcctgagctactctgtcacgtcagccccgaaatggggaagatcaggacacggctgcatcattagcgattcccaactggttcttcagtaactctcctgatgccagggagatctcagagcaaagcacgatcacagaaaactgcctacgctcgttcccactctccagtattcttctgtttttcatctcagtgaagacggattagagaaacttattatatttaagaaatactcatttaagcttctaagcaggaggtttctaccaagaaaggcctaatctctctctttcatctctttctgcctactgaatgtcttgtaattctgctgttgatgatgcacagacctccatgtatggggctaaggatgatcgtatgtcaagtagtagacactttcagcagaaaagcctgccctggtcaccctctggtgactgaccatgatccaaagaccatcaaagaccaaaatgtactctcattcaaagcatgaacaggagtgacggaagacaagaagcccacgacggaagacaagaagcccacggcttgttccactcgggccatgaagttaagaatgtgaacaagggtgacaggcatgattctgaggcccaaaatacacagagacaaagcaaactgaggcacagagttctgaagccccgtatctctctaatttctcatcttcccctttgccaccatttctggaatggtctccaagttcagtctctgtaggtaaaaggcaatgggtaatttaagagtttcatgttttatttccatgccttccactgcattttcacagctaaagctaagattgtgatctccccagcttatcaggctacaaaatgttttcacgtgatctatcatgcccacaaaactgcccttaaaattccatctctgatctttcccaggagacatgctcatcacaaccttgctgcctcttggactttgtgggtttttttgcttgtttgtttttgagacagagtctcactctgtcacccaagctggagtgcagtggcataatctgggctcactgcaacctccacctcccgggttcaagcaattcttctgcctcagcctcccaagtagctgggactacaggctcccaccaccgtgcctggctaatttttgtatttttagtagagacggggtttcaccatgttgaccaggctggtctcaaattcctgaccccatggtcccatggggtccccatgggaggcctcagcctcccaaagtcctaggattacaggcatgagccgccgtgcccagcctacctcttggactttgttttaatcgggtgagacccttcttgagatgaccactcttgattagcagccctgtggtatttttcaaaggatttttgtgaaactgactctgtgccaataattctgcaaaagtatctctgtgaaaacttctacgtctgtgctaataattctattctacccctaattaaatactcctaggaaacttgtaagaaatgcagacataggggattttattcagtgtgatttcatttggggaggactgcctaattcaaacgtgtaactctaggctggtggatatttcatcattttctccagcactgaaccaagagcatcctcaaatccaaataaaaacagcctctaccatatggactaagctggcatctgatgcccatcccgggggaatgatacgacgacagtttttaaataaaggtgaaaatgacttggtgatctttggctactgtcaagagataaaacagtccagtgttttttcttaacttgtattttaggcttggggtacaagtgaagatctgttacacaggtaaactcatatcacaggggcttgtcgtacagattatgtcatcacccaggaattaagcccagtactcaatagttgtcttttctgctcctcccaccctccaccctccagtaggccccagtgtctgctgttcccctttgtgtccacgtgttctcatcatttagctcccacctacaagtgagaacatgcagtatttggttttctcttcctgtgttagttcgctgaggataatggcctccagctccttccatgtttccacaaaaggcataatctcattctcttttatggctgcatagtattccatggtgtacatgtaccacattttctttatccagtctgtcactgatgggtacttgggttgattccatgtctttgctactgtgaatagtgctgcaatgaacattcatgcgcatgtgtctttttggtagaatgatttacattcctctgggtatatatccagtaatgggattgctgggtccatggtatttctgctcttagctctttgaggagtcgccatactgctctctacaatgttaaactaatctacactcccactgagagtgtccaagtgttcccttttctccacaatctgtccagcatctgttactttttggctttttaacaatagccattctgacaggtgcgagattgtatctcactgagtacacgctgttgatgtaattcaagtacttctgaaaacaaagggtagttatcgactacattggaactatgggaggagaaaggccatgagtgagcgtgtttgtcctgggagaagggatgtctactgcatcaactgtggcttttgtatgctgctcatgtaggttccatttctctgtctcagactaaaggggacctacaacttgctccacccaaaatatttcaatttaagagatacacatagagaaaagtgatgatgttcagaaagctttctcctgaaaacataaagacagcccaggaacatttttatttgaatggtaaaaatgatcacacagcaaagacaaaagtaggctgaaaccttcaaagtcaaatgaaagtaattctgaagggcgtctgtactttaattatattgggtgaatgttggtgtccaggctgtggtcatggtaccacggtggtgaatgatgtttccactggggtcagctgggtaaagagtatactcctgaacaactatgtcctatttttgcaatgtttatgtgagtctaaacgtactgcaaaatgaaaaaaggttaaaaattaaactataaaatgccatgtcattagacatgatgtggatggccctctgccaattcatccatgatttaacagatacatttggttttcttattacacttgaggtgatgtattaagttctctgggagattctaaaagacacaaaaggtaatctctgtcctcagggagcttatggtctccttgggaaaacagagacataaacagagagaaagttttaaaatgacatttatggactgtaagtgacttttgaagctgcacataagtaatcatgaagttactgagatgaaaagtgggtgccgcacattaactggaaagcaagcacctgtgtgtctaaaatgtggtgacatgatgtgtggcaccaccttccagaagctggtgtctatgtgctgttcatggctgatcccacattacctgacccacaataatcaccaggtctatgttcattattgattggatacaggtgaataaagatgctacttgacctaactctcagaagattaaatcaagtgaagcaggaattacaaaaaggagggtgactccagcaagagccccagatgtggaagtccaagccacacctggaaaacaggatctctgccagctagcctggccagtcatgatggtagagaaaggtggaaagaagctggcatcagaggggcttaaatggcaggaaaacaattcatataattgtgctatcaccctagaaacccagagactgtttcccatgatttgatttgtgagatatttctcacttcatctgtcttatctgtgttcatgggtacacggccataggcactcagatgttgcatgaaaaagaaatgttaatctaaaaaaaatgtcccatagtttgctatttttaaaaatatagaatgcaaatcatgataattttcttctttgcctgttcttagatttcttttttttcttatcttattgctttggcaagggctgctagtccaacagtgaattacaggggtgttgtcatgcctataattagttccctgtgtccaatttatagaattgtgcattcttgacaaaagaaaatgcacagatagagcaaggtgagataggaacccaaggaaagagaagggactccatctgtaatgttgcagtgggtccctccaatgctgcaaagacccagagcaagcctcaaggaagaattccacttagaggtaattcttttccacaaaggggccttccagtcatcccacagaagtggattcctacattaaatccccaagtcaccatgtagtcttgcagtttcacattatgttagtggcaaatcatgaattatgagcttaaaataggtgtaaactgacaaaactgcatccagtgatttcagatcccatgttaactacatgaattgttaaaccaatgttaaagtcgtttccacagcattggattaaattagataatgggttgcttgggctcataactgctttaacatctataagatgcattcgctagtatgatgctaaggcatggcagacataaaatcaataagagagcttctaataaatgaaagaatatcaactgcttcatgtgttttagtggagaaatcatgaaattcacattctgtggaataattttggtcagccagagtagggggtagagggccgtgggcagtgtatacaggctcagtcaaaagaagccaaatatttttcatgtgataaccacataagcaaagttaccttaagacaaatcatgttttctttccaaaagtcacttgaaaagtaaataaatttataaaagaaaattagtgcattaatatctttttcaagacaattatataactgcaataagttaggacaagatttgtttaaaacataacaggaaataataatgacaagataatggctaaaatgataatgagagtgttctttccctaaatagtactccactaaaatatgacatcttaaaaactgctggtgagcagatcaggaaatgagcatcattagtcctgacactagaaattcatgcagcaaggtcatgttttcacaacaaatcagcttgttcattctgccagttcagtacaaaaattagtagacaaattcatgataaaaaggatcatgttagtcttttgtctgcattgatcatagaaactgattagaaaagtgagattgtgtacatcccagggtgacagagccttgtgcactgtccaaggtgctgattaagagatacccagggtcattccattttgcagcaatagttatctcagagaaaacaggacaggtcgccgggcgtggtggctcacacctataatcccagcacttggggaggccgaggcaggcggatcacgaggtcaggagatcgagactatcctggctaacatggtgaaaccccatctctactaaaaaatacaaaaaattagccaggcgtggtggcaggtgcctgtagtcccagctacttgggaggctgaggcaggagaatggcgtgaacctgggaggcagagcttgcagtgagccgagatcgcaccactgcactccagcctgggcaacagagcgagactccatctcaaaaaaaaaaaaagaaaagaaaagaaaataggacagatcacctctgattcagggaaaacatggaggaaagggaaggacaacatatgactggctagccccacaccaaggaagcactggacacaataacacatactattattataacaattaacacctatcaaatgcctctttctgccagctgctgtgttaaacactttccctaaattttctctttaacatttacaataactctataatgtgagcataattattatcatcccttatatatcaatatatcaagatgtatatgtcaatatatcaatcttaatatatagaatttgaatgctaggtgttaaataacttgacaattaggaggccgaggcaggtggattgcttgagcccaggagttcaagaacagcctgggcaacatggcagaaacccgtctctaccgaaaatacaaaaattagccaagtgtggtggtgcatgcttgtattccaagctacttgggaggctgagctgggaagatcacctgagcctggaagttcaaggctacagtgagtcctgattgtgccactgcactccagcccggacaactgagggaaaccttgtcttgaaaaaaattaatagattcattaaataacttgaccaaagacatagagctgccaggtggcagttctgggacttgaactaaaatctctgtctccccaaactctacataaagatggagaaactgttaggaaactagagttaaattcagttcgttggtggtggcctcaaagaatatagagaaggtattggaattaaggactctagatttatgggatcacagtaaaaattccaaggacgaaagaaatacatatttattcctaggtccagcaaacatttactgcaagccaactgtgttccgagtttggagcacaaggagtgaccatctgtaaactcattgatctcgggaagcagtgaattaactatagacaaaaaagagagagaaagcatatgtaatagcaaagaatagggactctgggagcaggtacaggaatcccgacttcaatttcctgtcccatcatcactaagtgtgagatcttagaccagtctcaacttctctgagcttcagtttcctcaattcttatgcacctcagagggcttttctggggcctaaatgacataattcagttcaacgtttgctaaagtacctagcacacaggaagtgcccagggagtgattagcattctgccccctcattcaagcatcctaatgactctcctgagatccaacacaaacaggtagagagtgcatctgaactaggtgtgaaacctcatgtttgtggttatgaaatggatacaatatacggccctcataaagtgaccctactaacatcaccctcaaattcaatgacagttacttaggcttacgaatacagactaaaaacaacagaagttgtcagtgaaggcactgttgaacagtactcctaaatgtttatttaacagatatttgaattcacttacgtgctgctctacacatttgataaacattaatttgttcaaagttcaaaataactatgcagtgggtgtcatcattatccccattttagagagaggaaacagagacaatagaagttgtcagtgaaggcactgttgaacagcattcctaaatatctaacaaatatttgaattcacttatgtgccgttctacacattttataaacattaatttgttcaaagttctaaagaactatgaagcaggtgccatcattatttccattttatggagagaaaagagagacaagagaagttgtcaggaaaggcaacgttgaacagcattcctaaatatttagcaaagatttgaattcacttatgtgctgttctaaacattttataaacactaatttattcaaagctcagaataactctgtgaagtaggtgccatcattatccccatcttagagagaaaaaacagagccaagacaagttaaaagactcactgaggtcacacagaaaagacttgaaccctgcgatctgactccagtgtttgggtgcttaactactatcctgtatcagctccctgtggtgaacttctgcctctgttgagatgaatcgggaaaacagcttatgttgaacaatcagattcaggagaaagccctcgcaggaaaaaatggtaaatttaaaaaataataataataaaaagccttttccaaaagcccatgttggctcctggctatggcagcagttagtcaaaatgagaagcagcgtgggtctcacatgatgcacccctcaccgtcctggacacagacggccttagtatttatactttagcctctgaactttattccacttaatgaactcaagcaccataaatgcaagcctgaacacacagcatggctcatttgaagacagaaatatgattatattattacagaaaaacacattgaagtggtaagtgacaaaagtgtagatacatttgtttcccagaaaaccatctgaatgtcttaaaatctaataaaagatctatccggggcacaggaaagctgttcaacaaccgcctcacctctgatttatagcaggcatttttatgatgtttttatggctttgacctcagaaggatttctcgataaagcagctaaaacacgaaactgctagtgcaaaagccagttgcatgtaccagaggagggagattgtccgagaccttgaaaataatgccccatgcctggcaaaagttaatcgtcatctggttccattctgagcaataatcatgaaaggcagccgtgcaggccggctctcagaaatacatttcaatgagccaggcccatcgccaggcacggagaggaggcagcacccgacaggaacatcatggttgtcatggcaaccacatggcatggcaggtgagcctctgccccctcgtacttcggggaggaggagaggaaatgaacaggatgagcagcactgtgctagattctgaccggggagtcaaggcttgctgcacttgtgttcctggtgtcaagcaaacccgtgttttcaatgcagagttttgttgttctgttttgtttatcactccacagcaggcccaccctggcaacgtgcactctgtctgcccggatcttcattagccggctgcaggataagaagcactgtggcccagaccttcccctcatgtggcctgcataggataaattcatatccaatggatcaaggtggtttctatgaagccctagagaccgatgattcattctcactgtttgcataatttttatcttaccatttgtctaagataaatgattggaactcgggaagtggtaccaatcagggtgctgtctggaaacagatagaacctccagctgggattctgaaaagttagacaaggaacaatgtagaggggcatgggcagaattaaagtccagccagggacgctcgggcactcaggatggacaaccaagcaactgtgagaagctggtgacccccacatggggagacccaggccaggggagctggagccttgcagggaggtgcagctgctggaaacaccccaccaggaaggaatggagacgggggaggctccccaccttctcgcctgctaccctcccaactcaagatggtgccatcaccattggccaagcccaaatggaaagcagacagctagagcccaagtatgcagtgcagcccccaggaacagtgtggagaggagcaggaagggggtcaggatgagatgtggagaaggtcagagcaccgggccagtgagcaagtgagccagcactgtgcacccttagggcgtaggtgcagagacgtcttgcatctcggcttcttgatctaaacaagatggtcatatcctgttatgggttaaattatgtccatgaccccaagttcatatgtaaagtcctaacccccagtgcctcagaatgtgcccttgtttgaaaatagggtcttagcagatgtgaggagttaagatgaggtcatactggagtagagcagaccctcgtctcatatgcctgtgtccttatcaaaaggagacctttgcacacagagctgcacacgggaagaatgccaggtgaagatgggcaaagaagggtaaagcacctacaggccgaggagtaccaagggtgctggcagccacagagacagggagaggcctgcagtggagccccccacagcctcaggaggacccagtcctgctggcccctggagctcaagcttcagcccccaactgtcacgccacacgtttctatctaagctgccagttgctccagcagcccaagaaactcatccgtgtcccatcaggccatctgaaaatgcagtcaggcctgccctcagccatgcgagtgaccttggaggcgggtcccaccctagtggggtgagctgggatgtggaacaccccctgcccgggctcagaagcagaagccccttccaaagcccgcagccccaggtgatgcctaggcagactcaccacggactctgagcagaagtcttggctgagctgtgcccgaactcttgacccagagaaaccacaagacagcagatgtgtgttgtttgaagccaccgagttgctgtaatttattacacagcaatcggtgacaaataggtcacagctatagatgacaaattcagctacctgcggagattgatttttaaaaacatattttaaaatcctcttttttcctgtacttatctgtagacaagagtgtcaccttgttcgatgccccgccttcatctagagacaccaccacagaccctggggtcaaagcgccttgctccaattcctgccccttcccagtgagcagctgtggcttcggcaagttacttactcctggctcctgcgaccccggttcctcacctgaaaagtcgggcgataatagtgtccacctcattgtgttgcagaaggaaataaacaagcaaataagaggaaatatgtgcttaagacagtgttcagactcacgtctggcatagaatcaatgctcagtgattatgagctgtaatgattactatggttatgacaaccatgatttgattctattcacccaggaatgaaacaacaacaaaatgcaatggcaggctgacttttcctggggtcattcttgccggtttttttagctgacagcatccactcaagttctcccctcattgtctcacggagaagagcttgctaataacaccctaacaattagaaggcagataaatctggaaataaacatttccacagttatgatcattttggacatatgggatcataatattttatgatcaccaacagacacacctctctctgcaaacacacacagctgccggggtggggctgggctttgcacttcctgagattgaaagagcaaattttcttcctcacagtgatggtgacagacagaaatcagctgctggctacttccactcaagtcaggctaagggtacgtcagcagccgtgcagctcagtccgactccagggacccaaaaaagaatgaggcacgctgttaggtcagcagggagagccccagagacaaagggaagagaccgagaatgcagccagcctgtggtgtcactcacagggttgggtgtgcagtcagaggccaggcggcccccttgagaagggctggtcccagcagcgcatccaagacctgcaagggcatctgaatcccctgtgaaaagggtgatgatgacctgctatgtccagggaggagcttgcaattctgtgtttctaatccgcttccaaggggacacttttccttgctaaaatgttaaatgacatttgctgttaacaaacactatatacttccaagtaatttattgacttggtcatgaaattgaaattgtcaagtaggttagaaactcacattctccctcttttttaaaagcttattagtctatattttcataatctcaacttctgatgattttatcttctcttatgccaataccttgttttttagattttatttttaatagacaataagtgtatgtatttatggggtacaatgtgatgttctgatatatgtttatgttatggaataattaaatcctacttattaatgtgtcaatctccttatttctctgtggtgagaagatttgaaatcgactctcctggtgattttcaaatatacaaaacattgctattacctataggcaccatgttgcacaggcagttctcttagaatttattccacctaatagatattttgtatccttccaacaacagctccccaccccctaccccatgccctggccccaacctctggtaaccatcattctcctctctgcccccgtgagttcgacttttttggatttcgcctatgagtagatcacgtgccgtttgtctttcaatgcctggcttatttcacttagcatagtgtctcccaggtttatccaggtaagggcagatgacaggctttccttcttttcatggctgaatagtactccgctgtgtatatacaccacatttctttatccttatatccgctgagggacacttaggttgatcctacaccttggcgatggggaacctcatgctctcttaaaaaacacgattcccatttgttaagggtgggctgggactgcgtgcagggcactgacaggcgtacctaattcacattagttctttaactccctggagctccgtgagaccacatgctgtagagactaagggtgctggcttggaagccacaccatgactgtgtcaacctgggagctagcaggtatttagatcccagatctagcactttgtaaccagatgacctcgagcaagctacttgactgctcaaggcctccgaattttcttccataaaatgaacaacggtaacacctgcctcgaagggttgtttaggacatgctctgcacccatgaggcatttgctcttataactcactctgcccccagtttacagagagggaaactgagaatgggagcagggggtgatttgcttaagggcagacagctggtcagcggcagagctgccactcaatcacaacacacggccaaagtccagggtttgtttaatctgagatctgggaatgacaactctcccagacggaggcaaaaatgtgttctaaaggcaaagtattattgcaggtagaatttctatttcccccaccatattcaggtaatgtggtaaaagacttcctaagttcccattccaggctatcattcttattaaacctgcttaacttcatctcccttttaatttcactgcagatttaatttggggggagggcagagtcgggggtctcggttccagggtttctcaacctcagcccggtggtcatcttggtctggaagattctttgctgtggggctgtcttgtgcagggcaggacgtttagccacacccctggcctccacccactggatgccactagaccccccaccggtagtgaccacccaaaatgtctccagacattgttctctgggaggcagtatgtgctctgctcccactcccatccgctttgagatccccagtctaatctaccataaaccatgggttacgctttccccataacacagcaacgctgactcctcgcgtggccaagctgcgcctttccatggccccatgttcatgagtcaggagagcagctcctcaatcgcatgtgtcttaaccaaatggaactctactttcaaagtaacgttcaacaggcatagatcaacctgttagactctacccaaaatatctcatcgtggcctccctccctatgcccaagagcccatgtcgaaattttcttgcaatccagtattaagggctgagttgtgccctcacatccaaattcatctgttaaaggtctaaaacccccagaacctcagaacatgatgttctttgggactagagtcattgcagatgtagtaagtcaggggaaggccatgctggagcagggtgggcccctgacttaatatgactacagtccttacaaaagagggaaatgtgagcacacagagacagatacaaagagaacgccatgggaagataaaagcagagatcagggtgatgcttctgcacgccaaggagccccaaagatggccaccaaatcaccagaagacaggagagaggccagaacaggggctccctcacaccccttagaaaaagccaaccctgccaacaccttgatctcggatttccagcctccagaactgggagagaataagtgtctgtcgtttcagccatgtggtctgtggtcctttgtcatggcagcactagcaaatgaatacacagagacacttattttcccaaagtccaacatattttatgtcttcattcattttcctgatgtctcaaaccaggggttgaggcaacatatttagggaagctaggcccaggtcagtgtggttaaaagaggagcgtcagatagttctttgggaacctgactgatacgagcaaggtaccccaaacccaatttccaccttcttcttaattgcaggagtttgtaagcctctttctccttgattcagagaaccctgggtagagggacgggtccttcttgcgtaatccggtgtgatttttctggtgaatcacatacagaatacggatatgtttaactcccaactggccattaaacacatgtggtcatttgcggtagctctgaaaggcatctcaactcccatttttaaattaagggatgaacattcactaaacatgataaaagggggtttctgaacgcagaggcagccatcctagcaaggatggctttagttttcaaactctcctttaattttaacccacacaactcttttgctgcacaaatctgttaaacagattttagaatgagatcttttcattctccagagtttgggaagagtcttaaatttatctgaatttatcttttattaataatttattctgatggttatagtaatatatgttcactgtcaaaaaatgttaaaatatagaaaagtgcagaaaaaatgacgggaaaactatcaaactctgcaaaaatgacattacctttgatctgtgaaataaagcataaaatcagacacacaaggaggggagatatatcatcaatttttaaagtttaagttttaaaatatatatccatcactcttttagtgcattctttttctaatacttagcaaatgaaacatttgtgtgtaatctaaaattggattttattaacttacttcaaagccaccctccatgaaacttagaatactttattcacaaggaacaatagttccataaaattcttaatagagtggagttttatctgctagaaatagaaaaagcaatttaagctagcttaattgaaatggaaaattatgactttacctaactggaagtcctggcatagatcagccttcaggaatgacttgatccagggaccctacctggcaagtgcctggcttctactcttttctgtatatcaaacttgctgtcaggctgaagtgacatgggttcagcaggaccagtcacctttgcttgacagcaaccaagggaaggaagtacaggagtacttctggaagctcacatagaagaaagaaaaatcttttctagtagccatctatgagcctctcctcttctctcattggccagagttggatcacatcccctatccaggaccaacccctcataaaggctggggttctaaggccaaaggagcttagccttggctacaagggtggggccttggaaaaggagtggaaacctgaaaaaacaacagcagctggagttctgtttggcaggaataaatgaaaaatggatgtcagcaagcaaccaagtgccttctcaattctgtaagagtggtctgtatctgacagctcatcagaattccactgggcacattcaagagtgaagggaatttgaaaggcaggggaaaatcactgagctgggagtaactcactgtgcatttaataaaatctaagcagaaatctctgacagcgtagcttggtatgacggacggctggctgtggacagcttttgactttactgatctcatctatctttctaactgaggactaaaccagaagctaaaaacgcattcacgctgcataaaatgtatctgctaaaacactgttatcctgagtttggttctaaatctcagagggcttttcaaaaagcatcttaaaatcttaagtgcaagtgacacacaaggacccaccctgtcaatttcatattcccatcgccccttagaccactctacatttttcttccacaaataaatgaattaccagacacttgaaacgcgttcttacgccctgccaagcctcttcctcaacaagacacctggtggcatctccagctggaagtccagtgattaacctgagcatgagaaggctaaattggttcaaataccaaatggaagaatagatcaaaggattgcctgaaagtcaatggggttgaatttctagatcaaaggttaatagcaaaaggtttaggattcttctacaattattaagctgttcaaaggaatggcccagtcagacttcatagggaatcaagtatgaaaacggtgactcatcattgagactatactgggagctttcatttctaatgctaacatcctttgaagggataaacaaatatgccctactgcagcagggctttatttaagtgcaattattttttcagtgatgcttatttaaatcttgagccgggttggccatttcaagccagtagtcaagtcatcccaaatgtacattgactagaagtgggttcacaggtactctcatctcttctctgtgttactgtaataacctcaccctctccaccaacccagcagctagagcgatccttttgaaatgtaagtcagcttgcatcattcttccatctaaaatcctgcagtggttttccgtttcaattatatacaaaagccaaaaaccttcctacacctgctgggctctacataacctggcttcccagcctcctctgctgctacattttcccctcgctcactccatctctaccacaccagcctccctgctgttcctatacaagtcaggcagtcccagtcccagggcccttgcacctctctctgtcccctcttcctcttctcccaggtgcccacgtggctaactcccccacccttcaggcctgctgttcctatacaagtcaggcagtcccagtcccagggcccttgcacctctctctgtgccctcttcctcttctcccaggtgcccacgtggctaactcccccacccttcaggtctttggccatatttcatccgacgccaccctgaccaccttttacaacttctcagatgtccccttcctccttattttatttccccagtcttttcagcactgtgtttttttcccaaagcatttctcatttagatgcgccaaatcttttacttttttctaacattttaaaaattggggtgagatttacataacatacaattaactattttagagttaacatttcgccagcaacaatggtataacaaatggccaaaaagcccatgaaagggcattcagcattcttagccatcagggagatgcaaaggaaatagggtatatacatacaatggaatattattcagcctgaaaaaaggaagggaattctaccacttgcaacagcgtggatagacctcaaagacattacgctaagtgaaataagccagttgcagaaggacaaatactgtaacactccttttatataaggcctctaaacagtggcagttaacaggggatgtaagagggggatgtggggagttgtggttcaatggggttcaagttcactgatatacaagatgcattagttccagagatctgctttgcaaccctgagcctacagttaataaggtactctgcacttaaattgtgttaagagggtagactcaatttaagtgttcttaccacacacacacagaacaacaaggaaacccaagaaaacttttggaggtgaagagtgtgtttattaccttgatcacagtgataacatgaatgtgtacatatgtccaaactcaaactgtataaattaattatgtacagtttttggtatccaattataccaccataaagcagcagggggaaggaaatgtaagtcaaaaccacaatgaaatattacttcctgccctttatgatgcctataattttatttttatttatttttttgagaactctgtcacccaggctagagtgcatggtgtgatcatggctcactgcagccttgacctcccaagttcagatgcctattatttaaaataatttttttaaaaaatggaaagttacaaatgttgtcaaggatgtggagaaattggaactcaacccttgctggtagggatgtaaaatgggaaacagggtatggaggattttaaacacagagtcagctatgacccagcacttccactctcaaactaggtatcatatcattgtcagctgtctctccccaatggatcatgagttccatgcatcaatgatgttgtttcatttgatgctggatcctagcacctacggtagtgcctggaaaagaggtgggctcaaactatgtgtcaattaagtggatacacatgtggttgcttccttattctcagaaaagaactaagccattccccattttatcactatttctaggataaccatgagctcccttaactccgagattcctgctagtatcccaactacaaagcccactccttgtcccctctttttaaaattattttgtagctcagtaacatgtttggggtctttctttgtagatctttttatttattaccatcacatttgttcacacagcagcacaaagggtgatatgaaaaacactgttaacgaaataaatagaaagcagtgatttcagggctgttgccacacagcatcccaattttgctggagatggaagagggaagagccaatttattgccatattccattgtctttaaaataatattgtttctactcccaaaaatgaatggtgagaatgtgaaaacctgtatcagagatgatgcattttcttcctagcaggcttgtcaagtatcagttcctaacgagaactatgcgatggaacttgtcattgataaagagggtcaaatctgtaatctgcctgcccaaggtcaaaggctgtaatctgccagcccataggctgaattcattttgctcagtctgcatagtgtttaactttttaaatttgttgccaatttatacacacatgcacacacacacacacacacacacactcactcaacagtcctagcttctaaaacatagcaggtgtttgggcaattctgggccccacttcctgtaaggcaataatagagaaagtggagctgctattgcccctctagacaagaggtgcaaggtggcttgaaaaatatgtccacaaattacctgatgctctatctttaaggaggcggagattaacttgattatgggctaaacttagtggctcacttctaacagaatagagaagctgtgatacgtcgcttctgaggttaggttataaaagacacagtggtccctctctcatgagttgttctagaagcagcaagctaccattttatgaacagcctatggagaggtccatgagctgagggtcaaagcctccagccaatgaccagcaaggagctgaacctgccagcaaccgcaccagacaagttggaagtgatccatcaccagcttcagctgagcctccggactctgcagccccagccgacagcttgactgcacatctcgtgagaagctgaagccagaccaggcagccaggctgcttctaggatcctgaccctcagaaatggtgagataaccagagtttgttcttttaaaattgctaagtttggggataatttgttacacagcacttgataactgatacaacacaataactaagcaataccatgctgctcaatgtctcctagggctgcattaagggattatcactccagccttcatgtttttcagctccctttaatgggcagagggcagctgtgcctacagcttcgatggttagggtgggcttaaatgcacaggaaagaggggagtaggaaatgctttcaaaggcagagtcagaagaaaggcatagcgaagatgaaagaggtgaaggaagttggtataaaaagctctgaccagaccaaactcagggaaagtcaaatacaaaatacagccagggaaaattaaaattctttataagcaaggaagcttttgagatgtccagatgggtgaaatctttataagtattcacataatcatcatctatggattcagaagaagcaaccgtggattaaagacacagaacatgtttgcaggccccaggtttccgcatggtctggcagctggcgtatgcaccacaagaaggcagagtcccttgtcccaccacaaactgattactagaaaggctgatgcttattagtttgcatatgttctgaaaaatgcgagttcatgacatcaccatgttaggattgcgctcatgtgcactctgatgtactttccagcctggagcgtgtcttgcctcctctggaacccacccttctatcccccactctgcctgaagggacactagagggagacagaacgggggagagggaggagggagggtccctgagggtctttgtccagttgccccccacataactgggcatcggcacgtccctgggaaggggcagcaggttcctacttgccattttcccacatttgcaggctcagcatcacatatccccctgggcatagcagccacagcggccaacacccctttcaggggtctgggtcccctccaccctgcctctaagtcttaatcatcccacctcttccccctggtcctccagccttgcagggggagccactcggcatcgcctttctaggtctctattacctagcctgcagttcttcatagggaattctctctgtggaaataattagcatgggctctgtctcctgactctgcctcacctgatacacctgtgcctttcagtgcaccttggcctgtcttacctatgccttggagccatcccacgaacatcacctgccatgcaccaattaaaaaaaaaggcccgtggtcccaggaccattatatatgatgtttcctccaaaagatagcctgctgattggaaatctaacatcaggtgtccctccattccagattagttaaggttctctccattgtcagcaacagaaacggcctttggcagtcttaaggtaggatgtaaatttatagaagaaggcagggtttctcataacttctaaagcaaagctcaaccaaccaaccttgcaagaggggagacccaggatatctcaggggactcagcacgggggtgtgggggtttgagaactttctcttctgtggctgtttctcatgtgcttcagctccccagacaactaactcctctgcctcctgtgcaagcattaagttcccaggaatccagatctaacagtctggctggatcagtggtaaccctaagtcagctcctatgcatggacagagttctctggtatccacacaggccctggggccagtcccagagagccgtgagcagacattcagccttttgatcctgacttctaatttcgggttgacaatgacgtgctcccctctgggaaacccagaagcaatggagagacaagctctgccgctcaggagactccagtggcaatgaaagtctctgccagatgaacagcccctttgccaacttgatctgtgcgcttcttcccaagtgctcagagctaaatgctttgctttgagacatctgttgaaaacacttccaggtccccaatcccacagtcatgtttcttacgtaaatgatttgatacacgctatttcacaaactctttttttccagccagctcctgtgaggtgggcagaattatttgagtgccaagagggcatctgctgagtaggaaagctatttctggatcccagggcattatccaatggaaaaaaacccgaattcctagagttgatttctaaaatgccacgtgccctcctcacacagccattgtaactattggagctgtgtgttagtgacagggcacctatctgacatctactgccttggagaccccccaccgagaagctggagcagacaggacatcctcatgtattttatgactgtcttcagttccgtgtataaaaccttattctcataggatcacatgaagcagactgggaacacctactagacagtccacacactgctagtccaggacatgtcagctccctgggccctgggacagcctcatccggctctaagtgaaccgtgtcaccacatgaacagcatgacctcggtcacgacctgaacggcaggcatcggactcatgaagaaacatcaggaggcagcttccagagaagagaaagccttgttagcttaaagagcaaagcgtccccctccagccatctcactaacagaatcccaggctccttcttctcacgcccagttcttctccaaaaactcaccgcactccagtgacccttgagaaagctggggctgagccacgcaacctaaaaccagctgtccccaactggaacaaatacctgtctacataaactgacatgcgctatggtttggatctgcgtccccaccacatctcatgttgaattgcaagccccagggttgcaggtgcagcctggtgggaagtgattggatcatggtttataccatagccttggagctattctcctgatagtgggttctcacgagatctggccatttaaaagcgtgcagcccctccctcttctctctcgctcctgcactcactgtgcaagacgcctgttccctcttcaccttccgccatgactgagcgtttcctgaggcctccccagccatgcttcctgtacaccctgcagaaccatgagcccattaaacctgttttctttataaactacccagtctcaggtatttctttacagtaatacgtatatggcctgatacaacatgacacggccaattatttgcatttaaaaggcatctacttaatggtttatataaataatgaactcattggaaacctaccttactctgcacacactcatttcacacacacctttatgaggaaggaatgccatcatgtttgtatgaaaatcacacaccttgattatttccgaaataccaaagcacagcccggatctgcttgacaggaagatccactctctttcctctctctctgtgatgtattaaaacctggaattttaggccaggtatagtgactcacacctgtaatcctagcactttaggatgccaaggcaggaggatgacttgagcctaggagtttgagatgagcctgcgcaacatggtaaaggcccgtctctataaaaaacacaaaaaaattagccgggtatggtggcttgcacccgaaggcccagctagttgggaggctgaggtgggaggatagattgagcccaggaggcggaggttgcagtgagctgagatcacaccactgcactccagcctgggcaacagagctagactctgtctcaaaaaaagagaccaaacaaaaaccctgaaattttaagctctttacgggaacaaacttcagaaaggaggaaaacactgatatgtcaacacctgaggaacagcataaaacaggagcaacagaaggtgacaggtaagaggtgaggacagaccttggctagactgcctgcgcgacacctgctctgtgtggctgtggacgagtcgtctagactgcctgctctctgcactgtggaggagtcgtctagtctgcctgctccccaccctctgtggagcagtgactctagcagttcccaccacacacagtcatataggactctgacccaatgagaacagtgttaagcgcaacatcagttccttcttatgcactttcatgaacatgatgatgactgggaataatcaacaaggtcacagaataaaaataactgcagcaattagagtgggcaggtgcttttctttaagcaggtggataaaggagaaattaactccacaagtgcttactgaaggcctgctacgcattgggggatgtcgctggtgccaggaacacaaagatggggaagaaacaggcaaaggccctgccctcatggagcttagaactgaatttatggcaggaactgagaaaaaaatgtcacgagaaaaaacgtgctgcggtcattgttttggcacttgagggaaggggctaatccatggcgggaagagggctgagttccggaaggaggaggaaagagagatataggctttactgggtctgcatcataaagggagaaagactggggggttactagagatgggggggagagaagtagctcagccaggggaggggaagtgggaggccatgacagaaaacagccatgcatgggtccccgcaaggggaaccaccctggcaggtctaggaactgcaactccctgacactagatgtttagtggtttttgaccacgtgttcgctgccacacacaagactcagctgccgtgtgtgctactgctacccatagtaacattttttttttttttttttttggagacagagtctcacttttttgcccaggctggagtgcaatggcacaatctcggctcactgcaacctccgcctcccaggttcaagcgattctcctgccttagcctcccgggtagctggaattacaggcgcccgccaccatgcccagctaatttttatatttttaatagagacggggttttaccatgttggccaggctgatctcgaactccacagtaacctcttaatgctcagacagttggcaccacctgcatactcaagaccctcctgtgccgtcccaccccacttgggacaaaacgggaacctcactgtggcctccaaggctgtttgtatctggcccccatggcctctcagacctgccatctgctgtgtccccttcactcactctgctgccccacactggcctccctgtggccccctcacacacccagggagcccacctcggggctgtacatgctgccccttcccacctggacacccctagagccccctccaccctgagcaccgtccctggctgcactcagatggtcggcctgtcccggcgccctcggtcacctctaccccttcgctgctcctgcacagctgcatccatgccagccttagccattggtgtatctactgtttgtctcccagctagcaggtgctctgagagcagactcacttcagttccctgctccacccccagtgcgtgaaacagcatggccaggagttatgaggaaggccggggatgaaggaaacttagcacgggtgacagggacaaagcggccggaaaacccacagacgtgttaggaggaggggcctcccactgcacgcaccacggaggtcccagctacttggacacatcagcaaaagatgcctttgaagacccaggcgctcctgagtcccaaatgcactcacagtaaccccaaacatggaatcacccccgcaaccagcagtcacaaaaaacccattgattttccttcttcccggctcgcatgagcatcaggtatagaagggaccttccttggacactcggctccctgggcctgacggtggactcatcctttacaaggcggctggagacgacctgattcttccatccctttcccctgtgtgcaggttttactgggctgcgtgaacttgctggatgattctagaaagctgacaggggcagggatgtgacaccgatttccacagcatgatgtgctgttatagaaagcactgctacaaaacagacacaagagatgcaaacagaagaaggcagcttatgctcattcgagttaattaatccagaggctgtgcagggactcacagggtttctcggtggagaaggggcactgctctggggaacgctggcacacagccagcgcgtgtgcagcaggacgacctgtatgcactgtcaccacgggacggggccagagggatgcacccaccaactcaggggacaggtggagcgaggcaggagccagggtaggagcagggtcaggagggctgtgggagctgtgaggagggacccagattccgccacagggcatccttccccccggggggacagagctgtccacggcagctgcgagtgacgaagccttcttcccacagccactgctggctgcagccaagcagatccagttcaagtgcccagcgcctgccccaaaacgtggtcagaccacaaagcagacatggcagcctttgagaaatcagtgaagcaacactgcaggccccctatagcaatggcttcatcccaaaaaaaggtatatatgtatttattctatgtatctatacttattctatatttattgcatacttcatgtatattatatttttatatttatatattgtaaataacaaagtaaaagactcggagcatagagacgatgattgcaaaaataactgttggattgcagtaggatcagaggtcaatatttttaaatgttctttactgttagtatgatacttttaaagacagataagtgttcgcgcgtgtgtgtgcgactgtgtgcgtgtgagtgtgtgcgtgggtgtgtgcgtgggtgcgtgcgtgggtgcatgtgggtgtgcaagtgtgaggtgcgtgtgcttactggagatatagacgtgatcagaaagtgagctgcataaatgtattagcgattctctgagctgggtctaattagacattggtgatgggtctgaacagtctttgaagttcagagatgtgactctaggacagggcagggtgggctgacccccacctgggggggtgatggctgtgtctggtcctcagtgacaggggtagccaaggacatgggtgcaggagtggggcaggagggtgcaagtggagaaacgcaggaagccaagtcagcatgacacagccgagctgccaaactttgggatgtgggtcattttgaaagcgctctaggctgatccaggcctggagcatggctgtccacacagaaatcccatccccagcaagttcccccaacatgctcccctccagctcactttccagcctccacccacatccctgcaggcacacatggaattcagaagtgaagaagggaaagagttgccaattctgacgggaaggaaaatggcaagcagagaactaagcagctgggtctgtctcctagagtgggttttcacatcgagggattatcaccacgctaagggatggcacgcggggaggtcaagcttactttccccccttcagagggatttagagtgaaacataactagcaaacaaggaaatctaaatgagaaaaaattatcaaacagatcaaaataaaaccttgtcataaacactattttgtttctggctggagctaaataaatgcaagatgcagcattttgagaaacagcagcagctgtcctgttgggggggtggcggtgggcggtgacatccacaacccccatgttcatcaccgagggggacaccacacacatggcgagctacctccttccctaggaactcagcctcaaggagctcctattctccagtcagcctaagaaaaccccccacaacagagtcaaattctcatctcattctattgccaatgacatgagagaattctggggcaagttatttccttttaaagaagtctgtggttgccatcattttatcttttacataaaagctcccagtgtgtgtgagagacatggagatgcatcgctgaacctggtaggccgcaggcagcttcccctttctggtctgaggtctcacaagctccagccatctgcagcacatcaaagttcaaacggctgggagcacaggaagactgaacagtggtccctggcttttctcaaggactccagagagggcatcggaagccctgagcagccccaccgcccaccccagggctcacaacccctctgccaccacctccttgtgctctaggcactgtggccgtcacccactgcttgccaagcctggttccctctgtccactcacagggaagacaacttcctagaccccttcattagctaggcccatgcggccaggtctcacccatgcgttgtgagcagaagacctgagtgctgatgccctgtgccaagtcctccagaatcacaccccccaccgccacccccacccccagacgccctgtgccaagtcctccagaatcacaccccccacccccacccccagacgccctgtgccaagtcctccagaatcacatcccccaaccccacccccagacgccctgtgccaagtcctccagaatcacaccccccacccccacccccagacgccctgtgccaagtcctccagaatcacaccccccaaccccacccccagatgccctgtgccaagtcctccagaatcacaccccccacccccacccccggcagtagcctacaatgctcacagtactagagttgctggggtccctgaggaacaacagtgaacagaagttcccaccaacccaatggacatgccgcagaggcaagaaacacacttgagaggttgggggctgtttgctgctatggtgtgagttaaactctccaggcagatataggaatagaattcttcccctccaacccttttaagcaatattcatgtgacatttccatcaaagtaaagccaagtccccatcagtgaacacatctctttctactttcaccaacgttacagtgtatgcattcacctataataactacgtgacccattcctgcctgcaactgtcgggccctgttctaggcactggggatccaaatgtgcatgaaacacacaaagctttgttctcctcgtcgtgcagcgtgctacctagcacatagatgcaacatgctaagtagtgataagcactgtaaacacaaagcaccatgaaggggatggaggatgaaggagacagagtggtcagcagaggctgctcagatgtggctgccctggagccgctcacatgggctcacaggaagatctcctcctaagtcgtgtctgttgaagtcatctggtaacttgaaaataatcgtggtggaaatatttacactgtgggaatgggcaaactgcacagcaaaatgttctgggctttttctttacttccccggaaagctggttaacaggacacccccggatatttgaattcagagcagaggagaatgagggagtgagctgggtggctctttgcagtgaggaggagcatggtggacagaacaactgccagtgtggagacatcacagtgggaactgtgtactctgcagggaggctggtgcggggggaccgttaggcaaaggggctgcggacaggtgagggggaggagggggctgcagatcgtaccttgtaggccacggtaggaaccttgctttgtatcctgagcatgagaagacgtcttttttacctttctgtatcttttaatgtgtaaccaaaaccacaggcccaaagcaaaaactacaaacaggaacggagagtttcatgaccatagacatgggcatttgcttccaagagcaatggccctgcatgctttgagaatcgctgtgagctgtgcttctagatcctcagcaggttggcgcatgaccctcagagccctaaacacactacccgtgggcagctggcaggtggccagctgcatgccggcatccaagctgtgcgggctaagtatctcctcccgcgggaagcagatggcccctgcatgtgcacttgctcatacccagaaccaaagcaatcacccaggaaagagaatcaagccagactattcagtcctcccagccaagtggctggtaaacccgagcctccctgggtctggaaaatggagagatgaggatgaagcacgagctggcaggacagggaggacggcagggagtccttagcacaaactgccagcagcagcgaggaggagccccgccgagcgccgagaggcatatgtgcgcaccacatgccacaaacacaagctccgagtcctaaacgaatcacaccaggatggagattgcaggatggcgtgtttccatcgcgtgtccaggcgcagtgcctgggagcaaatatctccatgtagaaagagaccgacagtgtggcaggagtcgcggggtggaacaggaacttctggacagagatggggacaaagagaagcgaaggggatggcccagaccttcacagaggagacaaaatgtcccggctgcagcctgaggtttgcaaggtcaccatgggctgcgttgaaggatttctcctttcttgtctggtagaatgactcacccctttctccactaagcgctgttactctgagcatacaccagaggctcaggttcaaatccagtcccctctattcactgtgtgaccttgtacatgtgcctcaagctctctgcacctgtcttctcatctgtaaaacagggatggtaacggtgcctgacttacagggcagctatggtgacagatttgattagaaccatatgtggctcactgggtggaaaatggtgcctaataaacgctagctataattataactgccactgtattcatcccttctcacactgctttaaagatattacctgagactgggtaatttttaaagaaaggaggtttaagggactcacagttccacatggctggggaggcctcaggaaacttacagtcacagcaggtcaaggggaagcaaagcacatgttacaaggcagcaggagagagcacaagcatgcagaggaaaccgccatgtttgaaaccaccagagctcatgagaactccctcactatcgcgagaacagcatgggggaaactgccccataatccagtcgcctcccaccaggtccctcccttgactcgtggggattacaattcaagatgagatttaggcagggacacaaagctaaactatatcagccacgttattgctattattatcatcattatattgttattgtcaatattataattaaaaatgcctttatggtgcaataaacgggaagctgacatccctccatctcatttgaaattcaatccctccccacccgccaaccctcagagctaatgtgaaacatctctttaaacaatggtaattatgcgaaacaatagctatatagtaacgtaacctttgtggtatacaggtaactatatgccgattagcttgatagtggtaatcatttcacaatgtctacatcatcaaacaccctgccatacatcttatatagctacggtttttacttgtcaattatacctcaacaaagctggggaaaaaaatatcttctctgaaaggcagatgtgaactggatggtttcacattaagccattatcacccagtagcacactgtggcaaattattcacaggattcagagattccaggaaagtaaaggtagtgcaggcttggaagctgatgaggaggcatgggtcagggcctgagctggggcagaagctcagaggattccatccatccacttctgaaccttcctgttctctgcctctactggcctctggtctacccaatgccttctgccccgtttccagaatcatctttctcaagcatcattctggatggctgctgctctgccctagaatccaacatggctcccagctgccagcagtacaaagtgcaaacctgcctgacatccaagaccttctgcagctttgcccctgcctcacctgtccaacctcgccttgacctgactctccagctgcatcttcagccatgcacagacctgttctcctggccccagtcgtacatgcctgtgttctgtttctcgatcatagcaaacttgctccagccttggggcctgtgcactgtgggcccctctgcctgaacaggcttcccttggatcttcacgttagctcattccttgacattcagctctcagcgcaaatgcccccttctcagagacttcccctcgctacccaacgaccgagtccctcaccctgccccgtctccacacttggcttgtgccttccactgcacgctccactatctgaagtcgcaggtcctcatctggagccctagggctgaacatgtgcagagattcagaaaggcttggatttataagatgtgcaccaaacataactaatgctcccagtggtgtctgacaccgtctttcattattaaatatattcatagttctgcggtgaaatatgtaaatacaaatcaagtgggattaaaaaaagatgagaagttgtctcacatccattggttcagatttcaaggacaaatcagttatttctcaggatcttttggttttcagggccttttgaatatcagagttgtgaggaaggggtggggcatcgtagcctgttgcttcagttgtttgttcttggtctggtgcagaaaagagctcacacggcacgtctgagccccgcttttgaggaagggctgattgcaagcccggctggttgtgcgatcttggatcaggagggcttatcccattccctggctaataagagggttcacagtggctggccttttctagaaacaatgtggtttggactaggtgtctgctttccttatgagagcctggaattttggtacatgctgggcagagggtgccgacgtgaccagtcctcagtaaaaaccctgggccctgactctctgatgagcttccctggtagatgacgtttcacacctattgtcacaactcgttaggcacgtcctgtgtgaccccactgggagcggctcttgggagcgtgtgtctggttgcctctggacctggccccatgctcttcttccctttgctggttttgctggtttgcttgaatacttttgccagagtaaaaccctcatagctgtgagtatgactgtgggctgagtcctgtgagtcctgagagaatcagcaaacctggaggtggtcttagggacccccagcacactcccccattgagcacaagctcattgagtaaaagcaccttatctgtcctgtgtactaaggcctcacactcgtgcccggtcaataaatactagatgagtggacccagcaatggtcgtgttcaccatcagaccagaagcgatggtgaagggtccaacagttccctggccacaatataggaaccagagctcgagggaggcaagggaggcaaaaccatcacttaataaagaccagatcagtatggctcacagcctggggccaaattcaaaataagtaatattcagtctgggaaggcgaggcaggcgatcacctgaggtcaggagttcaagaccagcctggccaacatggtaaaacactgtctctaccaaaaatacaaaaaaaaaaaaaaaaaaaattagccgggcatggtggcaggtgcctgtaatcccagctacttgggaggctgaggcaggagaatcacttgaacccgggagacagaggttgcagtgaaccaagatcacaccactgccttccagcctgggtgacagagcaagactccatttaaaaaaaaaaaaaaaagtaatattgaccccatatggtttggctgtgtccccacccaaatctcaccttgaattgtaacaatccccacatgtcaagggcggggccaggtggagatgattgaatcatgggggtggtttcccccatgctgttctcatggtggtgaataagtctcatgaggtctcatggttttatgaaagggcagttcccctgcacaagtgctcttggctgccgccacgtaagatgtgtcttccctccccttcactttccaccatgattgtgaggcctccacagccatgtggaactgtgagtccattaaacctctttcctttgtaagttactcagtcccaggtatgtctttattagcagcgtgagaacagactaatacatcggctttatttgaaaatttgatattttgttcatcagggactgcacattaattttgatattttaaatactgcattaagaccaggtgcagtggctcatgcctgtaatctcaacactttgagaggctggggcaggcagatcacttggggtcagaagtttgagaccagcctggccaacatggtgaaaccccatctctactaaaaatacaaaaattagctgggcgtggtggtgggcacctgtaatcccagctacttgggaggctgaggcaggagaatcgcttgaaccctgggggcggaggttgcagtgagccgagaaacagcccgggagacagagtgagacccagcaatggtgtgtgtgtgtgtgtgtgtgtttgtttgtgtgtgtgtgtgtatgtatatatagatatatattaaaatatctcctatcttggctccagcttttttcagtgccacccacacactgtgcactgaggcaggggcctcgtggccgcaccctcatcctgcccttcacctgctcatattcatgggccaggcactgggggtgatggtttccaagacaggcaggtcctggacagagcagtgtgtttgtcacatacaaaagagactagctcaagggtggcagcctctgggtcatcaactgaaatgccccgtggtcccaggtcacacaggggtgtgccgggagtcaggttcaaacacaacagggtggggggcgtggatctggtgagctgaagcccacacaggggccccatctgctccagcaatggtttccaaccttactctcagatcactgctgtcttaagagttgattttacataaactccaaaagttccatctccatcccagctccctcctccaaggtccatgctcacccccactgcccacccagcctgtcccagtggaggtctcagaggcatcataagagcatccagaatgaagccgagctcctggccttcctgccagtctccccaccccacagccctcccgtgccagtaggtggcaattccaggctctcgcggctcaggcctcagacctgtcgccttccttcctctgttctctttgtcctgtggactctgacttcaggacatacccggaacgtaagtactttctccacagctactgctataagcctggcctgagtcatcaccattcctcgccgggttatgagaatggcctctcaatgggtttctcctggtctgttcttactccccattagtaagctgtcaacatggtggccagaagtcacaacaccaaaaaataagccacacactattattttgcatatcaccttttaatgacttcccatctcagagttaaaccaaaggcccgaaaggctctgcatgacctggcctctcctccctccctggctcagtcactctcacttcaccaccaccaccaccaccgacctcaggacctttgcacctgctgctccctctgcctggcactctcttccgtgaatacccacgtggctcacttcctcacccacgtaaggtctttcagagaagctttccctaaacatccaactaaaattacaaacccctccacctccctccctcctcctctgctgtctccatagcactccctacctttgaatacagcagatgcctttactcatttattttgctggcttttctgctcccactagaaggcacaggggcagggattttttttaatctgttttgttcactattgtattttctgtgcctggtacatagtggaccctcaataaactagtattgcacacctgaatgaatgaatcttgtttccttcatttcaaaggtgaagaagtgggagctcagagaagtcagactgtttgcctaagaacacacagcccagaggtggcagaggcagatagtgtgtgattccagcccatgctcttcctgccacgcccgcccacctgcagtcaggaagcatgcatcccccaagagggatgacgcatggcaccatgagcggctctggtgagcacaagcatttgccagctgctggccagcttagagatggttgtgggtttcttaagccataacatcttatttgttaccacactgccttcgcttgatctagaccagtggttctcaaagcgccaccagcatcacccagggccctgaaagaaatgcacattctctgcccaaacccaggacctgctgaatcagaaactggaggaggggcccagccctctgtctttcaagccttctatgtggttctggtgtaatctgggctctgacctagactccaagtctcccgagagcagggcatttgtctagttcattcattccaacgcccttaacactatcatgccacaaagctgtgtggagaatgtgtttgatgaatgaataactgaatgccacctccactgtgactgactgtaaaagcatgatgtcaacaggtatttgttaacgtcctcttctatacttaagaatgttcaaggggcagatataaaagtcattaggagtgactactttttgttcaagaatttacaatacagctgggggattaaataaccaacatgttaaatatcaaatgccaccatcaatgagaggtgcacagttctgcaatgattcagtgcaccgactccatccccaggctagctgggcaagcaaaggcaaggcccaacactctatgttgtgtggcctttgggatgtggcatagtgcctccgcgcccccagcttcatctgtgaaggagggattttagcaccttccttgtgggattgtcaggaagattaaataagctaatgaaagaaaactgcctgaaaaggcccctggcacctaataaacactttgtaggtgctagttatcatcatcaccatgaccatcaccaccatcacctcatcaccattacatcatcatcatcatcaccttcatcactactattacatcatcactatcatgaccattacatcaccatcaccatcacctcatcaccatcatcaccattaccaccattacatcatcactatcacaaccattacatcatcatcaccacgaccatcaccaccatcacctcatcaccgtttcatcatcatcattaccttcatcactaacattacatcatcactatcacaaccattatcgcatcaccatcaccaacacatcatcactatcacgactattacatcaccatcacctcatcaccaccaccgccatcacctcatcaccacgacccccatcacctcatcaccaccacccccatcacctcatcaccaccaccgccatcacctcatcaccaccaccgccatcacctcatcaccaccacccccatcacctcatcaccattaccaccattacaccatcatcaccatgaccatcaccaccatcacctcatcaccatgacatcatcaccttcatcactaccattatatcatcactatcacaaccatcatcgcatcaccatcaccaccaacacatcatcatcaccgtcaccaccattacatcaccatcaccaccattacatcaccatcacccccatcaccattacatcatcatcaccatgaccatcaccaccatcacctcaccaccatcacctcatcaccattacatcaccactatcattacatatgatgtaaccacatatgtaacggtggttacatcatcaccacaatcacatcaccaccatcatctcaccaccttatcaccaccatcacctcaccaccaccatcacttcaccaccaccatcaccatcacctcaccaccatcaccaccatcacctcatcgccatcaccaccatcacatcaccaccatcacctccatcaccaccatcacctcatcaccaccatcacctcaccaccaccatcaccatcacctcaccaccatcaccaccatcacctcatcgccatcaccaccatcacatcaccaccatcacctcatcaccaccatcacctcatcaccaccaccaccatcacctcattgccatcaccaccatcacatcaccaccatcacctcatcaccaccatcacctcatcaccaccatcaccaccatcacatcaccaccatcacctcatcaccaccattacatcaccaccattacatcaccactatcatgaccattacatcatcatcactgccatcacctcatcaccatcacctcatcacaaccattacatcatcactatcacaaccattacatcatcactatcacaaccattacatcatcactatcacaaccattacatcatcatcactaccatcaccattacatcatcatcaccttcatcactaccatcactatcaccatcatcttttactcttttctttgtaactactttttattttgtattaaaatttcattctttgtaactattatatttttatttattaaagttgttccattctttttttttgagacagagtcttgctatgtcacccaggctggaatgcagtgtcatgatcatagctcactgcagcctcaatctcttgggctcaagcaatgctcctacctcctgcgtagctagaatgacagatgtacaccaccatgcccagaaatttttttttaaattgtctttgtagagatgaggtctcgctctgttgcccaggctgatctcgaactcctgggctcaagtgatcctcttgacttggcctctgaaagtgagaggttaacaggcgtgagccactgaatccgatgaccactccagccccatcattgctaccattataagccgtgggtgtaaccatgtcccccacggagtgagaaggggagggtcctctggtttgttactttctgctcatgaggcggggcgatggggagatgccttttggacgtttggggagtgaaaaggggatcaaatacattcgtcgaaaattcggtaggaaattcacagcccacacacattttgtttggtctactcagtattagcacacatgaaaatggaaaatgttgaattaaatggccacttttagggcaggttgtggtcatatgtgcctgtagtcccagctactcgggaggctgaggtgggagaactgcttgagcccagttggggaggtcctggctgcaatgggacatgtttgtgccactgcactccagcctgggtgacggtgagaccctgtctcaaaaaaaaaaaaaaaaagaggccagtttttaaaaccagaagattctacatgagaatctggttttctaacatcttttgaaaaatccaaagatctagcagcactgagcccaggaaattcagtgggcactgaatccaggctgcccctgcagggaagtaggtgacgtggtcacagtccccaccactccccgctgccctggactctgcagggttctctcacgtcttgcctgattcccacatttcacttcttggtctggcccccacaggccttttgagtctgccagccctgagactactaaaaacaaagcgtccctgagaaaagagaggaggaaatgggccaaagtacccatgtgggagcagctcattgttttcctatgactgatttctctaatattgctgaaatgtattttagtagcttaaaagtatttcaaaagtagttatgaaagtgaccacaggcactttctgtgattaaccaggaaatattcactaatctgtctctgatgagataaatgtatttcatagctttgtcttccctcaggagaatttataaattaagatgaagaggccagggcggtggctcacgcctataatcccagcagtttgggagaccaaggtgggtggatcacgaggtcaggagttcaagaccagcctggcaaacatggagaaaccccatctctactaaaaatacaaaatcagccaggcatggtggcaggcacctgcaatcccagctacatgggaggctgaggcaggagaatcacttgaacccaggaggcagaagttgcagtgagccaagataacgccacagcactcgagcctgggcaataaaagggaaactccatctcaaaaagaataagaagaagaagaagagatgggggatcaatagaacagaacagagccctcagaaataacgccacatatctacaaccatctgatctttgacaaacctgagaaaaacaagcaatggggaaaggattccctatttaataaatggtgctgggaaaactggctagccatatgtagaaagctgaaactggatcccttccttacaccttatacaaaaatcaattcaagatggattaaagatttaaacgttagacctaaaaccataaaaaccctagaagaaaacctaggcattaccattcaggacataggcatgggcaaggacttcatgtccaaaacaccaaaagcaatggcaacaaaagccaaaattgacaaatgggatctaattaaactaaagagcttctgcacagcaaaagaaactaccatcagagtgaacaggcaacctacaaaatgggagaaaattttcgcaacctactcatctgacaaagggctaatatccagaatctacaatgaactcaaacaaatttacaagaaaaaaacaaacaaccccatcaaaaagtgggcgaaggacatgaacagacacttctcaaaagaagacatttatgcagccaaaaaacacatgaaaaaatgctcgtcatcactggccatcagagaaatgcaaatcaaaaccacaatgagataccatctcacaccagttagaatggtgatcattaaaaagtcaggaaataacaggtgctggagaggatgtggagaaataggaacacttttacactgttggtgggactgtaaactagttcaaccattgtggaagtcagtgtggcgattcctcagggatctagaactagaaataccatttgacccagccatcccattactgggtatatacccaaaggactataaatcatgctgctataaagacacatgcacacgtatgtttattgcggcattattcacaatagcaaagacttggaaccaacccaaatgtccaacaatgatagactggattaagaaaatgtggcacatatacaccatggaatactatgcagccataaaaaatgatgagttcgtgtcctttgtagggacatggatgaaattggaaatcatcattctcagtaaactatcgcaagaacaaaaaaccaaacaccgcatattctcactcataggtgggaattgaacaatgagatcacatggacacaggaaggggaatatcacactctggggactgtggtggggtggggggaggggggagggatagcattgggagatatacctaatgctagatgacgagttagtgggtgcagcgcaccagcctggcacatgtatacatatgtaactaacctgcacaatgtgcacatgtaccctaaaacttaaagtataataaaaaaaaaaaaagaaaaaaaaaagaagagatgggggagcggtgtcctccaacttcccctcctgcctggatgctggtgctgccccccacacactgttctgcacctgccagcacatatgatgtccctgtccttcctctgtccctccacacagtcctgccagcacccctcatccagcaagccggggtcctcgcctccctcagcatctcaatcccgttcctgtccattcctgctcctgagccttggaacctgctgttcccccatcccatctgaatcatctcctttcccttctggcccaacaatccaactcctctccaatcttcaaaacccagcccaagtcctgcctcctccaggaagcccttcattcccctctctccagcctccagccccttctcatgctctgagcttcatttatgagtattccccaacccactgacaagcaggttccatccattcttggtgccatatccacatccggtctgtttagctcattttgtaatatttgtatttaaatcaattcactttaacattttctcaaggagactcaccttcaaggagacttgagttcactacactgaaatggagaaccagcatcattcactacaaacagcagccattaaaataaacatgagaaaagccaactgcaatcagatcttggctaaatgtgccaccttgtcccggtcactgcgagtcacccaagacctattctttctgcacgagctgaagggagacacgctgttggagaggtagtggacgtgtatcagcacccaccagagaggtcctcattgtcagaaccagaaagatttcaggagacaagaaagcgagtccaatgccatatggttcaatggttcggaaagcatttgaggacatctccgcagagcatattcactttgtcacctactgtatgttgtattatcctgtcatctgttgaacacatgaatatcggttcattcccagatgaaacaggaagctcagtagcttccctaagtgtctgccaagatgaccacataatagagctcacagaagttatctgatgtagactgtgcttaaactggtgtcctgaacatgattcaaattcttctttggtagctgcaagccccacgggggatttgcaaagatggaatcaggaattccttatgaaattaatctcctccagactttggtacattaaacactcgggacgtcagccttctgtcctaagccctttctgtcctaagagaagtcggagactgtgtcgataagacttgctaaccagtaattgaaaaatcaatattcagatctccagtgactctaccctcatatcccagctatagtcagcaacaacaatgaaatgtaataatccttttcaggaagaccctggcagggctgtcaacccaattaattccagcaaagtaacgtgggctctttcatcaaaagattcttacatacaaacacacacaccttcacaagtgcacatgtgcgcacacatacaacacacgctttgttctgttttgttttgctttctgctaaaatgaatagaaagactctttaaaaaagaaaaaagaaaaagaaaatagctcttggtgaaaagcactcattgatgtactcaatgaatcactttcttctctgcaaacaaagctccttatttctcccaggaggctgctttgaaatctttgctggaggatagggtcagccccaggacgagatgaaggctatggcttccagtcctgccacacaggcagctaactcctgaaactccaccaaatgactgacggatggagtgccagccatgcccagtttgttctcaccacagaaaaatactaaataggtgaggtgatggatgtgttatcttgatttaatccttccgcaatgtataaatagatcgaaacatcacagtgtacccttatagacattattatctttaaaattaaaaattaagtatttttaattttttaaaaattgacccagtttgaatagctcctcctgaacccaccctgattcccagtgaaaattagagcctaccttgaagccaggctttgcaaacttatcttcacactgaaattaccaggggatttttttaaactcccaaagccccagccacatcccagagcagctaacccacagtcctcagggtgaggcactggcacggccccctcgggctccccaggtgcagatgtggttagaaactgctgttcttgagtgagtttctgggagggattggagtcttcgactctcagatacaaatctactaagaattcattacatctttacaggaaacacgtgaaagcattcttcctgcagacgcttctacaccaggaaggcaatccccacacccacggggaaaggcaagtttagagtcaaataacacaatgccaagcggtctccccaatgagggctctcagcacagcactggacatgaaggaagcagaaatccacatggaggaatgtcatccccacaccctaggctgaagctcaaggccacctgccaactgacaacacacgtaattgctcctaatcaacctcatctccccagagaccaggagatagactccccagggccacagcacaaagaggccagcggtccccaaataacaagctcaagcttgcatccccactgtccctcagctccgcccatcagagtccccgccagaataagcaattccagcaacattccatgaagtcttcaatccacccaagggctccccgcagccctctctcatcagtggacagcacacacttttcagctggtaaaaaagttgaggatcttgcactaaagaaggatgacagatgaggttagaaaaataagagggtttacatctgcactaggtggcaggtggagctccctgcatttcttctgaacacaaaacttgtttcttttggagccctccgcttgccaggagcaaccagacctccccgcttctgaggcacctctcatttgctgatagttttgaaggaatgcggtttttaaaaactgccaggaaagcccaggatggcaaggactccaccttccatttttaccagcaaaacaatcctcacccccaaggtgtcacccggatggctggctggctggctggctaggtgcaagttgcacacgaacttccgtgaggaagcggattgtcgccccagagcaagtgcagccaggggaaagcgggatgcagactctagcgttcaacatcatccaacaacgagagcaacgcacttggacttcaagagaaggattaacatcttctcagggtgcatactccaggtcatatccatagggctaagcttgctgttaccaaaaatgttgattaaatatcattttcctaggtcctgggtatggaaccagaaactgactttaaaaattaggaggttaataggaagtcaagacaccacaatccacaatggacttgttggttctgacatggacccagcacatggctggaacgtcaactctccacagatagccagaaccactttctgtacagagtcattatttttttagatcttgcaggctagactgtccctgtcgcaaccactttgccatcgagagcaaactcagtgacagaggattcataaatggatggggagcacggctcctaggcaggaagggtcgcctgggtgttgaaggcactgttccagggaatatcatgctgtttcctaggactgccttgacacattcccactcaccgagtgacttagaacagtggaaatttattctctcacagttctggaggccagaagtctggaatcgaggtgtcatcagggctgggctcccttgagaggctccggggaggggcgggggggctccttccagccccttccagcttctgggggctgtcggcaatccagcctccgccctgaccctcatgtggccttcccctttgtctcttagaagggcccttttctttgggtttaccacccacccaggtgctccaggacgatctcacccagagatctgtaattgaattacaactgcaaagaccctttttccaaataagggcatattcccaggttctagtgattgggacatagacatatttgggaagccaccatccaaccccagatagagacactaaaaatcacttgttctgaaactcaaagttaactgtgcatttgcatcttatctgacagcctggatggctgccctgcgctgcaccactgccccagccgagccacgtcccaggcctggagtcagagaggcgtggaggaggcctgttgggcggaaactctcagcgtctgcaggagagctcaaagctgggtcaaggggctgtggggctgggtgtccacagcccttcttcctcccgagaggtaagaaacggacagctgtttcatgacagtctcacgactgattaccagcacatgccatatgctggttatgctggttatagcttaactatgtcctcttccacctgtgtaactgagtcaagcaagcttcttcaccacaacctgttaccatcagccctggcgggtgtttcctggaaactcaaaaattatcctaagtcccagtgccagggaggctgtggacacagagaaggggaacgaaatagtggtctcttttctgttttgacagccacccctttgcctgtgggcacttgcttctctgtgtaaaaatggatgcgctggccagatgcagtggctcacacctgtaatcccagcactctgggaggctgaggagggtggattacgaggtcaggagttcaagaccagcctggccaagatggtgaaaccccatctctactaaaaatacaaaaattagctgggctcagtggcaggcgcctgtaatcccagctactcaggaggctgaggcaggagaaccacttcaacccggacggcagaggttgcagtgagctgagatcgcgccactgcactccagcctgggcaatagagactctgtcaaaaaaaaaaaaaggatgcattgcccagcaggcagttactgagggcacagagaacccgggggaccttggccgtggcgggccaatcagcctgcatttgtgagaagagcgtttcgcccagcacgtggatttgtttcccaggcagggaaatcgggagcgggagagatggacagcgagctggtgaggatccgggctgcgatgtcgggagcggtgagagcgagcgcggcttccacgctgacccttctggcctcatcttccatactgtcaccagaggaaacgtcagacccacaaacctggtcatctcactgcgttgctgaaaaccctcccagggctctgcttccgctcggatagaatccacatcgcatcattcagcctcggctcagttcctcaaacaaactaggctcttcccgggcccattccctctacgtggagcatccttgccagcacattctccaccagcccattctcacccactcctcatggcctggccccggtgtggctccccaaggagggaccctccacccactgacagcagtctctaactgtagtggcagccgccctcatcatcacagcactggacacctttccgcaacagggcgtcgttcacactgctctcccaccactaaatggctgggcccaggaggatggggctgggggtgcttcacctcctccacatacccaaggacaggcacagtgccccgcacagggaagacgcttgagaaacactcctgaacctacgaattgagagaccaatcttgttagccgtgggattatctgcatttgcaacttcgacaggaagaaaagaaaacctttctctgcaggaagcgaagttcagcactgaagaaggtcccgcacccttggcggctggagggagaggagaatctgggtgctccgtgggctggatggcgacgtgagttgggcagctctgttcttgcaggagccattccacgtcatgcatgtccagtctgattttatgggaaatcctgactttatgtgaattatctccattttaaaatgttagcaagtatttttttctaaacactgcatgccaagcacagtgtgtctgtctgaaggcaacatttgctgatcgacctctcattgaaaatccctggtttcatgggtggttgaaaaataattactgacttgtcaagaattgctcttctcacatttccagaggactttccatctcctttcccaatcgctacaacttaggtttctatttcaataacggttaatgttatgaggttctcttctggtggtttgcgttacaatgtcttccagctccacaccagcatctcagtaatattgttatgattatttccaataccagaaggctgtgtcttgatccataaaacattcaacaccaataatttccttttaccctcctaacattccggaggaaagtataatctgtccactgtagacactgaagaatttgctggccttgtcttcctttcctcacttcaccaagtgaagatgggtttcacttttgggaagaaccttccgtcatgttgcacagtcatgtgatgtcaagaccctggcaaagatccccgactcccaattcagactgttcaccatcagaaagctaactctggctgagctcttgccagagaactgtccttcaaaatgtgggtcacaattcatgctcaggtcaatctagtggattatgaccagtattttgtaaacaagacagaagataagacaggtagaggagagcagaagactctagattgcattgcacatagaagagggaggtttacttgtataatacttatcttttaaggcaggggtgtccaaccttctgtcttccctgggccacattggaagaagaattgtcttgggccacacataaaatacactaacagtagctgataagctaaaagaaaattgcaaaaaaatctcatagtgttttaagaaaatttatgaatttgtgttgggctgtgttcaaagccatcctgggctgcatgtggcccatgggtaatgggttggacaagcttgttttaaggggggggtgtgggtatgtttgtgtatatggaagtatgtatgtacatgtgattactatatctctatgtacatgtctatgatttatggtcccaaaactctaaaaacccattgttctaaagtaaacaactcccagagatattttggatttattttaaccataaatcatcttccatctcaatttggggtgggatgagaatgtcctgagcaaagaaggccaaactattcttgccggggagtaatacaatgaaacacagcaatggtaattattgtaatggtggctgctcacatttgctaaacttctacaccctatcagacactattttaaaacactgccttcgttattaaggccattaaatctataagattggcactagcagatattacccctgagcaagtaaaagaacagcccagttaaataatgcactttaaagacatacagttagtagcagtcaaagactggatttgaacccaggaagtccagctctggagcctgtactcacacccatgagattgaaccatctctctcagcaaaccatgcccaaagcctgatgggctgccctgcagctaaactcagactattaaaacttcatcttggccgggcgcggtggctcacgcctgtaatcccagcactttgggaggccgagatgggcggactatgaggtcaagagatcgagaccattctggctaacacagtgaaaccctgtctctactaaaaatacaaaaaattagccgggcgtggtggcgggcgcctgtagtcccagctactcaggacaggagaatggcgtgaacccaggaggcagagcttgcagtgagcccagatcacgccacagcactccagcctgggcgacagcgcaagactccgtctcaaaaataataataataataataaaataaaaataaaaataaaaaacttcatctttaacaagcatctctccttgccttgaataattaacagctgtcattgcttctgcagcggcaaagagcctgtgtgagaacaatgcgcgtgcactcacagcagagggaaggaagggaagctcctccgggagacttttgctcaaagacagcacccctggggctgagcagggcaaacgccctgtgccagggagcaggggagagtgcagcatgatgccttcagccagcgttcggctaaggaacttgagtttctgaaatcaagtgtgcaaggagcttaaaggcggaaggactcaacgtacccagtgtggatattgttggcattttccaacacagacagaaatctagcactgataccatgatacctcctctttttgaaaatctgctgtgcagtttctgaacatactgcttcagccaagaagtatggtagaaagacatcccagtaaccaacacagatgttgcaaagccatcgtccctgatgttacacagtttactttctaggaggccatttcagaccttccctttgaatccactcaccccgaatgtgcgcacggttccaactaatcagctgattttgttcttaaactcacaactgtctggaagcaggtaggcaggaaggcagaaaacagacacgtggaaacccattcatcaggaagccatgggtgataatgccgacagcctgcgtttactgagcactgactgggtgctagtcattacaccaagggcgttactttcatctcctcatacgatgctgacaaaacccagaaaggggcactatgacccacccccaccttcccatttcacaggcgttgaaaccaggctcagacaaccttgcccaaggccacatagcccatcaattgcaaaaccaggatgtgaactctgcctacagggctctgaaactgaggctcatcacccatagttagtaacacccactcacaacgtaggaaaaccgtagagtgaattcacaagcacacacaatgccgaagcctagagccactgaatacacagcaaagagggttttctgtctcttctgccgtagtcacagtgtgtaatgcggtgcatgggacacagtaagtgctcggtaacagttgttaaatgaaataaggacacacattttaagagcccctaacagccccactgatattcctgtgccattgggaaacgccatccaatcactctgctctcttcagtcagatttttcaaagataaccaaaccgtatatctgaactaagtatttctacaaaaataactcacattaaatggatgaatttcgtggaagatacaaatgccaagagtccattcaagaagaaatagataacttgagtggctccatgtttattaaagaaacttaatttatagttaaagccttcatacaaagaaaactccacagatagttttgctggggatttctaacaattatttgtggacaaattaataccaattctgcacaaactcttccaaaaaactgaaggaacggaactctacccaattcattctttgaggctagcattagttaccctgataccaaagtcaaaagcattataacaaaattgtaggtcactatgactcataaacaaaaaaaattataaacacaatttggaaaattaaatccaacaatatattcaaaagaaagcccatcgtttttatttttatttatttatttatttttgagacggagtctcgctctgtctcccaggctggagtgcagtggtgcgatctctgctcactgcaacctctgcctcctgggttcaagtgattctcctgcctcagcctcctgagtagctggaattacaggcacatgccaccacacccagctaatttttgtatttttagtagagacgggatttcaccatgttggtcaggctggtctcaaactcctgaaccatgatccgcctgcctcagtctcccaaagtgctgggattacaggcgtgagccaccatgcctggccaaggtaacccatcttaaccaaatagagtttatcctgggattgcaagtttagtttaacatgtgaaaaatcaatcgatgtcattcattatacaaagaattctatgatgatctaactagacgtgcacacgaaagtatctgagaaatgacaacgtctataactgataacaccactcagcaacatgataagagaaagaaacttcctccatgagataaagagcacctatgaaatacttgcaattaacaaccttaaggtaaaaaattgactgctttctccctaagattggacacgagacaaggatgtcacccttaccacttctatttaaaattgtactggagatttaagccaatgcaatatgacaagaatgagaaatagacagcatttatagattggaaaagaaggaggaaaatggtctttatttgtggacaacaggataggctaggtggaaaatccaacagaattaacaaaagagctacaaagaactattaaatgaatttggcaaggtagcagaaaaggagatcaacatacaaaaaataatgtgtcactatatactagccacaaacaaaaacttaaagtttaaaaaaatacagattaaaatagccttaaaaatacaaaatatctacaggcacacttgacaaaagatatgaatgacttgccaactgaaaataacacaatattgctgagaaaaattaaagacgacctaaataagcagagagatatcttgcgtttgtggatcggaagaatctatgttgttaagaggtcattttttaatgaattgatctacagattcaacatgaccctgtcaaaatccaattatgctttttttgtagaaattgacaagctaatcctaaagatccacattaaaatgcaagggatgtaaaatagaccctgccaaaaaaacaaaattggagccaagtgcagtggctcatgcctgtcattccagcactttgggatgccaaggtgggtggatcacaaggtcaggagatcgagaccatcctggctaacacggtgaaaccccatctctactaaaaacacaaaaaattagctgggcgtggtggcaggtgcctgtagtcccagctacttgggaggctgaggcaggagaatggcgtgaacccgggaggcggagcttgcagtgagccaagatcatgccactgcactccagcctgggcgactgagcaagactccatttaaaaaaaaaaaaaaaattggagaacattattttaaggcttactataaagccacagtaatcaagatagtaaggtaatgcatcggatagacaaatagtccactgaaaaagaatagagatcccataaatagacccacaaatgtattagcaactgattgtcttttggaatttttgatggggtctatgtcactcagcgtggcctcaaacttctgagctcaagcgatcctcccacttcgggctcccaaagcactgggattacagctgtgagccaccacactaagttacaactgattttaacaaagatgcaaagagaatttgatggagaaagagttatcttttccaaaaatggtgatggaaatattggagagtcatacgcaataagtaaacttcaacatccttcacatcatatgcaataagtaaacccatccttcacgatacgcaaaaattaacgcaaaatagatcatcaatttgtgactttagattaaacaactttttttagatctgacaccaaagtacattctgtcagaacaaactggtaaattagatgtcatgaaaagtacaaggttctgcattttgagtgacatcattaagagaatgacaataaaagcaacatactgggagaagacatttgcaactaatatatctgacaagagagcgtatgcagattatacaaagaattttcaatattcaataaaaaacaagccatccaattaaactaatgggcaaaatgatttgaaaaacacttcacccaagaagacatatggcaaataagcacatgaaaagatgagcaatagcattagtcactggggaagtgcaaataaaactcaaaatatcataataccatgacttacccattaaactaaccagaattaaaaacactgggcatgcaagtgctagcaaggatacagatgattggaactctcatatactgctaatcggagtatataatggccctaccatttaaataatttggcaattaactacaatgtgttatagttgtacatattgacagttttacagtttctgcaaatgttaaatgcacacctacgtatatccagccatttcatcactacattttccacccaagtgaaattattgtgaaaggaaaataattcttggggcccccaaatcactaagctaaaggtaaaagtcaagctgggcactgctgagggtaaacctgccccattctattcaaagtcccccctctgcccacagagaaatgcatatccgatcacctcctttggagaggcttatcagaaactgaaaagaatgtaaccgtctgtctcttacctacctgcgacctgggagcccccactctgcctccacctttctagtctggagttgccccacctttcctgactgaaccagtgtacatcttacacatattgattgatatttcatgtcttcctaaaatgcataaaatctacctgtgccccgaccaccttaggcacatgttgtcaggactgacagagcaggagcactgccatcttggacaagtactgccattttaagtttcaccttgatcaaaacccaccaaaatccaaagggcatcagcctaatggctaaggtcagcatgaccatacaacacaaatgacgtctccgaccagaaacattccaaacccctccccgaccagagacctgccagccccaagataacctcccctcctgccggaaggatgtcagccccaacagaacctccccgctggccagaaggatgtcggccccaacagaacctcccccgtctggccggaaggatgtcagctccaacagaacctccccactgtccagtaggatgtcagccccaacagaacccctactctggccagaaggatgtcagccccaacagaacctcccctctggctggaaggatgtcagccccagtggaacctcccctctggctggaaggatgtcagccccaatagaacctcccctctgcccagagacattccaacactgccataaacttctcccctacacaaaaacattccaagcttgtgataagccccctcaccctaaaaccaatatgtactcttagtctgtaagacagaatgctcctgactgaaattggccagaagcccgtgatccggtagttcatctgaaaactcatttaactgaatgctccaagggatgaccaagctgctacaacgctgcttcttccccttcaagtctagggatggtaacagcttcctgctgttgctagaccctgtatgcatcactacttattggttctcttaacctccccacacctctataagttgtcccttgtagccatctccaagccctagccgagtacacccttcatttcctgccagggtgctgactgcacattctctgcaagtccacgctcaactcacggtgagcatttatacaccttgtcaggagagcaagcatgtttgggaatcagggtttggttaacactcttactgacaaggctcattctctgtgtgatttaaccaaccagaaggacgaccagtaatcaagatcacaagctaaaactgagttagtccaggccgccggagctctcacctgagtgaaatcagaccaaccatatcaactgcctaaaagccacgggctgctcacccaccctggggatggggtcaaagagggcaggcaaaaaaaaaaaaaaaaaaaaaaaaagcaaaccggctggtgaatgtgattatcttttacttcttgttggattgacagcctctgggttgtggtatatccatcatgttgaaaagccagctacatccatggattaaaaattaatttactgcccagcctggcttccagcttgatgccttaattaagtttgttattgcagtggtgctgagctccaaggcatcattcagcccagtctagagacctcagtgtttggggagaggtttatgagctctgtaatgcaattatcttccagcacacatagaatgcttatctccaaagtcactctgaattcatcccaggttctttgtgcatatgtaactaggaagagagttattgatctacttcttcaaagacacactcacaatagtcttgaatctcaaatgacaggagaatttgatcctattgctgggaaagacactgcttggaggagcacattaatttaattaaacatttaattgagcagctactatatatgttcagtatgcaaataggtgtgacataatccctgtagaagctttcagcgaaccttttaactaaatggaatgtcaatgagaaggaataaagggacagctccttatcacaccccctgcagcctctggccaagaaaggtctccagagatttttctttctttctttaagaaatatttggccaggcacggtggctcgtgcctgtaatcccaatactttcagaggccgaggcgggtggatcatctgaggtctggagttcaaaaccagtctggccagtatggcaaaacctcgtctctactaaaaaatacaaaaaaagaaaaaagaaatatttatacagtgctaacttgtgccaggcatatgacaaacattaacccattaaccctcataataatcagagaaatcctaaggtaggtacccacattgttcacattttgctgaagacgacacaggcactctgccgcccatctctctcaacacctaacctaccttatccatttcagctctgaggtcccaaaggaacattcagcatcataggtggggctggctgtgctccagacacaccctttgaagttaggaggatgtgtcccttcaatgccctccgcccatttgggggaggtttcttgcatttgcaaggacagtttggatgatgtgcacaagtcccagaaattcggccacctgtgtggcagcgctgggagctgcttccccagggactcctgtaagcgtgggatggctcccgccttgtgtgccattggcagggctaccattgacttcttttgcttgacttttttggtagcaaacgtgtactttgatcattgtctgatgcgtaagtaacagtcattaaagaattgaacaaacagatgtagacggtcgcatgacagaagaattcgccaacggtggttctgttgcaccatattgtaatcaacaatgttaagaacgtgtttccatttttaataggatttggtgttcttttagcataaacagagaagtgttattttggcagctcaaaaattgaattatgacaatgatactttttagctatgagaattcaccctgcaaggggtctatcaggaataattaacacaccccctcccggaagaggagaagaacatatttctcatttatagagatgaggttttcagttgcagcactggtcagtgaagcaatacaatttccacttgtcaatctcgtaattttaaaaccaaaattggcaccatatttcatattcaaaatatatcaagaaacagtactaataaaaagacaagcaaaagataaactcaagtggcaaatgagcacatgaaaacatggccatcactagccatccaggatatgcaaatgtaaacaatgggttcccatcagatgtgcacattttaccaatctgactataccaagtgttgacaaggcagggaagcatgcccacctgtacagaactggcaggatcatcagtcagttggcccagctgctagaagcactgggaagtctctgttgaaatagaagtgagcacatcctataaccctactaacttcaacggactcaacacatgtgctcggaaggcaggtgtaagcacctgcatcatggaagagtggaaacaacccaatagagaaatggataaggaaaatttgtcagccccagtgcatctcaaaacacaatgcagatcaaaaatagaagatgcagaatcatgtgcccagtatgatatttatgaagaaaatttacataaaaccatgtttttatggagactgacagatgggtaagtacaggcataagatacacttgcagtcacgagctgaggaacaatgtttccgtcaaggagggacacatacttgccatggtggtgccataagattctgagagaggtgaaagctcgctgtagccctatagcccggtgacttcacagccaaggtaacatcgcagcacagtgcatgactcatgtgtgtggtgacactgctgtaaacaaacccactgcaccgccagtcctagaaaagcctagcacatatgatcctgcaaagtacatcatgcttgatacgtgataataagcaactatgtcactcgcttagatatctcactatgctctacttttctcattagagtgtactcctacttataaaataactgtagaacagtctcaggcaggccttccagaaattatccagaagaaggccttgtcaccctaggagatggccgctccacgcgtgctttgcccctggagaccttccagcaggacaggacatgcaggtgcaagacggtgatgtgatgatcctgaccccgggtaggcccaggctaatgtgtgcgtttgtgtcttcatttttaaaacattttaaacggtgttaaaatgttttaaaatagaaaaaaattcttatggaataaggatataaagaaaaggatttttgtgcagctgtgcaatgtctttgtgtttcaagatacgtgttattacaagagtcaaaaaggtttttaaaaagtaaaaaaaaaaaaaaaaacctcacagtaagctaaggttaattgattattgaagaaataaaaacaatttttgaaaaatgcctttgaatcatgttttaggctactcagtgcggcccgagtgttcagtgtccataaagcctacagtcgtgcagtggaacatcctacgccttcacattcactctccactcactcactcactcactcactcactcactcactcactcactcaccagagcaacttccgggcctgcaagctccattcatggtaagtgccctatacagatgccccttttctttctttttttttttttttgagacagagtctcgctctgtctcccaggctggagtgcagtggcacgatctcggctcactgcaagctttgcctcccgggttcacgccattctcctgcctcagcctcccaagtagctgggactacaggcaccaccaccacgcccggctaatttttgtattttttagtagagacggggtttcactgtgttagccaggatggtcttgatctcctgacctcgtgacccgcccacctcggcctcccaaagtgctgggattacaggcgtgagccaccgcgcccggcctctttctcttatcttttatactgcatgttactgtgccttttctgcaaggtttagatatgttcagatagacacatacctactattgtgttacagttgcctacaaagtccagtacagtcacatcctgcacaggtgtgtagcccaggagcaatgggctccaccacacagcctcggggtgcggtagactccccggctaggtgtgtgcaagtgcactgcagggttcacatgacgagattgccagcacgcctttctcagaactcattccattgctcaggacacaggactgtgaaagtatactttaaaagctggaaagatacatactatcctaataatataatggatgcttctgggagtggagggtgggtaggtgttgcagtagactctataaatcaaagaattgaactttacttgtaatgcctgatttatttttaaaggtggtctggtctcttcaataagtcaatcacgcggggaaaccgtgtttccaactaaaagagactaaaaagacgtggctgccaacatcatacatgaggcgtggctggatctgggtgcaatcaaaataacaaggtataaaaaatgtcctggggataactaaaaattttgaatatgggatgaccaccgtatgctattggggaattactgttcatttttaggtatgacaatggcattgtggttgtgtagaaaataattttatttttaatgatgcatgataaagtagtaataaagtgacaatatctacaactttgaaataactcagtaaaaaaatagatgatgatagacaggcagacagcaaatatgacaatgctgttacatgattgcgtctgtgtgctgtgtgggggttcattgtgctattcttgccatttcaaggtatgctttcaatttttcataagtaaaagctaaaaatgggccaggcacagtggcccacacctgtaatcccagcactttgggaggccgaggtgggcagatcatttgaggtcaggagttcgacaccagcctgatctacgtggtaaaaccccatctctactgaaaattcagaaaaaaattagccaggcatggtggtgggagcctgtagtcccagctacttgggaggctaaggcaggagaattgcttgaacccaggaggcagaggttgcagtaagccgagaccatgcaattgcactccagtctgggagatagagcgagactgtctcaaaaaacaaaaagaaaaagaaaagagaggaaaaaaaagctaaaaatgaaaggttaatgtgtaactttttgaaagtatgaacaataacaactggaagtaaatatggtaaaaaataaaaaataaaaaaagattggccctgcctgagagtctatatggtgggaattacacacaggtgttttcttgtctgtatgtttctgagaaaaaacgttctcccaaattaaaaatcacagtcagaacattgcattcctgggattaccccctctcactattattctaccactaactgcctgggctaggccataaaaaaggaagcatggggtttgcagagaggcacaagcgtgacgcgtgggcagggagtcgcgcgtctacacagctcctcagttccacgcaaggaggcaggtctttaggtggctgtcaccgcatcagcgctgtggaggcggggaggagtgcaggttgaagaggcggaagctgagccaacaagtcccaaaaggtattctgtggagtgtctcttgggattcaccatttatagcaaaactcttagtggcttccatccaaaccttatctgaaagtctgcacttcatgagctgtaaactgttggagcaagcggtagagatcatgaactggagatactctccagcctcctcctcaccttctaaatatgacctgtgtgaagaattctgccctggtcctacagcctggcttttgcttgaagtcaaaaataatgcaaaatgtctccaggccgcaacagtccgagtcaccacaacaagcagttccaattcttttttaagatgaagtcttgctctgtcgcccaggctagggtgcagtagcgcgatctcagctcactgcaacctccgcctcccgggttcaagcaattctcctgcctcagcctcctgagtagctgggattataggcgcttgccaccacacctggctaatttttgtatttttagtagagatggagtatcaccatcttggccaggctggtctcgaactcctgacctcgtgatctacccgcctcggcctcccaaagtgctgggattacaggtatgagccaccacggccggcccagttcaaattctttaaacacagctcactctaccagtgagcctgaggtgtagaaagtattccttcttcacgtttaatttctgtatatagtcccagcttaaatcctgtaatgcacctgggcagagcactcactctcccacagacccggtcatctgaaacattcccactaagtgtttgctgatgtttccaggcggggagaaagggccctacccatgaccgcatctgctcagatcacaatttaacaggctgattaagatgatgtttaatagacgggtgcctccagttgatagctttccttgaatttgccacacagtgccccggctaatcgtggctacttgtgcatccgtgggtttctgccacgtctccacacccagaaccatgcttccacatgctcggtgggaacatgctgcttattcatggtgctttgatcatctcctgtgagtttctcagggacaggcatgaaaccactgcctccttaagtcatcctcaccggcgactgtttctccacactcagcccgagagcgagtcagacacaaatccgactccccagcaaggagaagcctgcattggtcagaaactgctcggaatgctcagtaaggggagccccagaaaactattcattccaccaggttcaagttccatctcctttttttccacttttctctccacgctgaccaagcagaagcatccatttttacagccgcttaggttctgtgttgggtgcaagcatcagaaataaaggccatgactccaccaaaaggggagctcccagcaggatgtgggaatgtgtgggggtcagaggtttggagggccaggcgcagaaggtaggggttcccctgcaaaaggacctgccagaagttcctgtcccccaacctggaaacttgccactgaagtaaatatgctcaaaacattgatttttttccttgattcactcaaagattcagcgtcctaggacagcgcttccagtcaaccttccatgtctgacctcccagcccctgcctgggaaccagggcaggaaaaggaaaaatatccagtggaaagagctgctagaaaacgctttggtttctgttgtgaatgggcaagttctccaagcttacggctgaataaaacaacacacaacaggacaatgggaaaccaagagactcttaggactagaggatgctgggcaggaaggccaacgacaccaccacagggggtcgcagacagcatttcctatgcacagcccactggcattgcatgtagcctcctgcctacactgatttctctgggcccttcagggaagtttcaagttctcagggccaaagagaccttcagtccaggctacgtgtgcctcttgcaggtctgatcacccaccctggtgtctctctactggggaggagggaagtctcagctccccagagatgaagaggcttccccaggtcaggagctgttgggctaggaccctcctcctggggggaggtgggcagtggggagaagcatctccaccggggaggggaggctcaggccctgtggggacagagcgctgcccaggccactcctctttaggactctgattttgtatgagtttatcatgtatcacgtggcattttgacatatacataccttgtggaatggttaaatctagttaattagcaagtacattacctcatagttattttgtggtgagagaacttaatacccactctcttaacatttttaaccaatacatcgtcattaactatggtcagcttgcagtgcagtggatctgaaatgcaccctcctgtctaactgtaattacacgtcctttaaccagcatctccccatggcccccagcaccccagcctctggtaaccacattccattctctacttctacgagatcaacttcttagctgccatgtatgagtgaggtcattcagtatttgtctttctgtgcctgactgatgacttaatgcagcatcctccaggttcatccatgttgtcagaaaactgtatggaggttcctcaaaaagcaaaaatggaatggccacgagcccactatgtcactggtaccgacccaaagaaaatgaactgagtctgtcgcaaagctgtctgcacccccacgtatgaactgagtctgtcacaaagctgtctgcccccccacgtttatacagcaccattcccactagccaaggtgtggaatcaacctaagtgtccatcgacggatgaatggatcaagaaaatgtgttctctacacaacggaatgctgttcagccattttaaaaaaaaatgaaatcctgacactgatgttggcagggccttgattaaccctccttggtgatatggtcagagggaccccgacccccagaggagaactgagccacctgggggaccttctctggtgaggtcgggggtcaggaaatgttgggcctgggtcactttcttctgttggatggaagcggggtggttagtcagggttccctggagaaacaggacaggatagatacacatgaagatacttatttggggagtttcctcgtgtgattacagaggccaataagtcccatgatctgccgtctggagagccaggaatactgatggtgggaattcagcctgagactgcaagcttgagaactgcagaagccaacggtatcgctcccagcccagggctgcaggtctgggaagtgggggtagggcactggagggggactggttgaggcccagagtccagaggtctgagacccaggagcttcagcatctgcgggcaggacagacggaagtcccagctccagaagggagcaaattcacctctcccctgcctttttgttctgcttgggccctcgatgaatcagaggatgccctcatacatttgtgacgattccttagtccactgatccgaatgctcaccttctccagaaacgccctcacaggcaccccaaaaaatagtgtgtggccagttctctgggcatccctcaacctagttaagttggcacaaagtcaaccatcacggggggaaaatgggaagcctgctcctcccagtccctcccgttctgggggaaaatgggaagcctgctcctcccggtccctcccgttctgggggaaaatgggaagtctgctcctcccggtccctcccgttctgggggaaaatgggaagcctgctcctcccggtccctcccgttctggggcctctggcagttcagcttccagggtcctctcttcatcaagtcttgctccatttccagggcttaaagctacactttgaagggagggtctacgccatctgtgtggccccaaaagtcaggtaattttttaaaaacctctccatgcttgtataatacttaacagatttaataaacacttatctctttgataaataaaaacaaaaggataaaaactaagtaatgtgtcctagcaatgtacaagagactaacaaacattttgtgactcatcaaagtaattttcctgctttttttttttttttttttttttttttgagacggagtctcgctctgtcgcccaggctggagtgcagtggcgcgatctcggctcactgcaagctccgcctcccgggttcacgccattctcctgcctcagcctcccaagtagctgggactacaggcgcccgctaccacgcccggctaattttttgtatttttagtagagacggggtttcaccgtgttagccaggatggtctcgatctcctgacctcgtgatccgcccgcctcggcctcccaaagtgctgggattacaggcgtgagccaccgcgcccggccattttcctgctttaaattcactgtcacctccccccagtaacacctgcaatgtctcagaaactcacatccattggaggctgttgctgcccagcgagtccctggccactctgcctccgagttccctcatttctaaagctctagcagcatcagctcccaggtgacttcaccctggggagtctcatccaacacctcatttcacagaggaggcctcaaaaaggccaggagaagagagcattgtgcctctagccaggccgcccaaagcgggcagagcctgaactcagcctcaggccactgacatgggctccggcctccaggcatcgctgccaacaccacagggaccgggaaccgccgcagctcctggaactgcacattcccctcccatcccacgagctctgtccccacgtcccccagaccccacaggggaagcactcagtgcctgcctctccaggagccgccttctcctccctgatgattgacgtccctcccgtaaaggatctctttgagctacagcctccatcagacaatacgttgcaggatattgggggcccttttgtcttccactcccgcagaagccagggcacctggggccgcttcatttacccgcatctctgcccccgatcctccgctggaagacaccggctgccggctaccgggcttcgctgcaggtgtaagtggcagatgccaccatgctggcggcgacgcgtctcctgcggagaggatttacctccgtagcctgggctaggaccttcaggaggcctgcacagcctcgatttaggaagccctttgcctctaaatacactgatggctttctcctccaacagctcgtgtcccgccccggcacacacatgctgcggagtcttggattctggtctgcaaggttctcggttgtacacctgacaaacagctcaggcccggcaagcaggacacggaacccatgtcgacccatgaaacccatgtaactgcctgttacacgaaggctgtggtggaaaaagttctctgccatgcagggcgcctgcaagagaggaccccaggtctaagaagttgctttgcaagtagaaagttggggaaaaccaattggctgcaggattgatacccgaagcagatacaatgcatcctctgagaagcatgtcctggatagttaaggcgtcatgagtctttgccctgaagagcccgcagggcctgcagggatctgggcagcagatccaagtcttccagagacagtgtgccagggcaggtgctcagacatcacacagcacagctcagagtcacgcaaggtcacctctctgggccagagaggtgacctccaaggagagcagctgcttggattgacctgtgtccggcccagactggagaacaggccgccacctgttcgctcctcagcctcaccttccacggtgaaaacaggccttctgagggctgagtgcggccccgggtgtttcagttggccaggggatccagcttttggctttttcataaagcatcaccttctctctcatgtatgaatatttactcagcttggacaagccctcaggccaggggttgaaaggtcaccatgcgtgagctgctctgctgtgcgcaaagcccaatccagacaaagtttggcctggctgctgggttaatgaaaagccaccccaggttgggggtccccagcccagcacccagtctggggtattctgtacagcaacccaagctaagagagcacattatgggaaaatggtgttttttaaaataattaaaacaccatttgacaggatggtgaagaccgtggtggcaagacttcagaggaaacagtgtaaatgcaaaacgggagaaacctggaggagcttgtcaaacacagctctatgtcttaaacaactggcttccccagtaaccaaaccgtgtggacatcaccgcaggcccccctggatgcagacactggtaccttattctgggcttagaccccatccgggtgaagcaaggtacacagcctgcagggctgagctgggatctgtcacttgcaatagagagagtccggatgggtaaaacagcttctcctttccctcccccctcccccaagtccaggacctcccgggtaaccccgatgattacacagcctccacctagtctccagccccccgtcatcgccacctgcacaggctacttagaccctgggttaccattcaccagctgtttctccctggccttccttgatatacatttcccagctccctggccggcaaggatgactaggtgacatttttgtcctcacgagtgtcctttggaaagtcgcatctgtcagaatccaggacaccagccagaaggccatgcctggtgagtaatgaggggatgggacggagggagagttgacagcagtgctggcgggttgccggggccaacaaggcaggggacgccgcccccaggtactccaattgtgggagctgcgaccgccccgccagagggccagtgggcaacccacagatacccctgccgcaatctccaggctcctactgcgacctcatcggccaagccacctggaagccacagggcaagagaacctgagtgaggaagtccagtgagcccagccccccaccccgcaggcagaggacagcacagaaggaggtagagggtggatctgggaggcaagcagggaacgcccagcacagacttcttcctttcttcggtaaagattcagtctcggccgggcacagtggctcacgcctgttatccagcggtttgggaggccgaggcaggtggattacatggtcgggagatgaagatcatcctggccaacgtggtgaaaccccatctctactacaaagacaaaaattagctgggtgtggtggcgggtgcctgtgatcccagctactcaggaggctgaggcaggagaatcgcttgaacccaggaggcagaggctgtagtgagccaagatcgcaccactgcactccagcctgggtgacagagcaagactctgtctcaaaaaaaaaaaaaaaaaaaactcagtctcattaagagacagctctcatcggccttttccgttcttcctgcctgggatgcaggcacaatgccagaaggtgcaacagccaccataggaccccaatgacagcagagagggagggaggcaggtcctttcagccctcatgccaccctgcaatggtggcctctgactttctgcatgagaaaagccagccccgtctctgcagggcagtgttagcaggttctattgttacttgcagctgaacgctgtctcacctgatgcaacaggctggcctacactttatgtttcggtagcacttcagacttggtaacacagttgcacgtatactatgtgactggaagcagaagaaatcaatgccattgttcccattccttaaagagtacaataaagaaacagaagttacttacggccaaggactaacatgagttggggcagcacccacaggaatcagcgaaaaccatgtgattaattaccaaccttgtgcccaacctcccttatcctcagaagacgttcagtgagcaacgtaaacaaaccgacgacattccctctgccctaacaacacaacacttctcacatgttagatgtggaaaaactgaagagcagtaacagacagcgctggggtataaggaaaaagcaataggccgctccacacagaaccagtgggaatgttgattcctggagtctttctgagaaaccatctcttggaggcgtaattaaaaagcatagacaaattctgacccagagattcccagaaattgattccacaaaataaaaaacataagaatgcgcacatgaagatctttagcatagcagtgacggggcaaagaaaaaaggggaaatcttgcaggtctgcagaggaacatcttttcatggtggtcaaagaaaattgtggtgtatccgtgccacagactacaatgaggaaatgcaaaatcacaagttagaattctatgtgttgacatgaaaaatgttcatgacgcacttttgagtaaaacaagttatcaaatatatatatataaaatacagatatataaaatatatatgtatataaatacatatattttatatgtactttacaaaatgttttataaactatatacatatttttgataacttgtgtgtctagtcatcttcagatgtgtaggtatgaaataggacagcttggacagctccccatttgtctggcaggaaacgtgcagatactgtgtatgtgtataaatacacatgtatatttcatatacatatatacacgtgtatgtgtatatatgtgtattatgtatatatacatatgtgtattatgtatacattatgtatatacatatatattatattgtatattatataatatatatattacaatattacaacatatacatcatattatatattatatacataaatgtatatatgtacacataattatgtatatatacataatacacatacatatatatatatatatatatgtgtacacacaaacatatatagatatttttttgagatggagtctcactctgtcgcccaggctggaatgcagtggcatgatctcggctcactgcaacctctacctcccgggttcaagcaattctcccatctcagcctccagagtagctgggattacaggcacctgccaccacacctggctaatttttgtgttttcagtagagacgggttttcaccttgttggccaggctggtcttgaactcctggcctcaagtgatctgcccgcctcagcctccccaaagtgctgggattataggtgtgagccactgggcctagcctagattctcattttaataaaccaacaaaccccccaaggcctagctgtggggatacaggtgtttgtctttgattatagacagggagaaaggggtggagggacatgcattgcttacctgggctatggaatgtgacactgtataagaattaggagaggagaattaagaaaaccaatgcccactaagtttaaacagcaccatttttcatgaacagtgacaggcattttcctgtggtggttggcaccggtttcaaacgtctgccatcactcttggaagcccccctgagcccacccagacaagctacatggagaagtccccatacgcctcttagatgccctcctgctccgggcggggacgtggtctggacaacagcgtttgctttttcacctctggcaggcaccagtctccctgcctggcaggagagtgacgcagtcggatgcacacacaccctagccttttgcattcttaaacctacccgctgggctctgtgtccaagaagggatgtctgatgttacagatcacaacgttccgcctgcacgtttcccaccagacaaatggggagctgttcacggtgtcccctttcatccctagacatctgaagaagatgactagacacatgccacattctgtctccggttccccgctctcctctcctttctgtacccccatctgttctccccccatgtctctctctcttcctccgctgtcttgctcccttctcctcctctctccttccttatttctgcctcccctattagtctcctcctctcatcttctctgactgttgccgttttcagaagggctcctggctcgggccagtgcggaatcacctgagcaactaccacggttgcaaacctcttcttgagggcttgctgatttctcctcaaacctgtctacaaggcaggattatttttaaacccatttaagagctaaggaaactgaggcatagaaaaagtcgcccaacccatcagccatgtctactgggcgcccaaatgtgcaggacaccatcctaggagacaatgaatgagatagaggttacggaatcttcccaatcccgcaccttcccagctcatcaaggcagagcccagggctggcaggaagacgtgaatgtcccaagatggggtcagcacagtgctctggagtctctccagtgacaggagagctccttctacatcgccatgtggcagccagcaaagagtttggccagcacaagcaggccacaggaaggagaagtcagagggtgactttggtttccagcacagaggcctggagagctctgccagaggcctgagcaggaaggaaaggttttcggggactgcttgtgtgggctgtgggtccccgcaacatgggccttggcgtcagctgctgacctgaagttggggtgcaggggcccccctcctcctctgcagaggcccccatgtcccactgatgagaggttccaccccatctctcatttttccaggactgccagccttacatctcatgttctgagcttcctgtgggccaggcctggtgctgagaccctaccagtctcttctgtgtttcattgtcaccaacgatcccccacccccgacccccgccccgagttagtgctgccacctccatccagcacacaagggatgcaaggcttagggaactagagcccaggcccacgccctgcagctgggagctgctggaccaggcttagaacccaggtccatcctcatgcaaatggcgtcatccctgccctttgcctctcactgacatttcctctccctcctcactggaaggagtgagtcaccatctcccttcaccagactccatttttttcctagcacacattgccctggggcaccagctgagagttcagtcaatgctgtggccccacaggcctaggccagctacagctccaggcagaaacgacaagcaggtttcagctgacaccagctttagatactgctagaagctgcttagtgggaggtattgagaagggcctggaggcggcctttcctttagcaaaggtgggctgcttcttatttcagctgaagcttcagaaagtaacagagagggccttgggctgagtgtctatgacctgacgctaagcagcccagcaccttcagtcctcgaaggtccgcagatgcaccccagttctgaattcacagaatgcacgcaaattagattattctggtagaacaggaatcactccgttgtctgggctacttagagatgttgtccaatcattggaaaactttgattgcatcagctgattttcagattgccaggtctctttagaactgggagattcttagaaacatctaactcggccgggtgtggtggcccacgcctgtaatcccagtaccttgggacgctgaggcgggaggatcacttgagcccaggagtttgagaccagcctgggcaacatagaaagacctcttctaaaaaaaaaaagtaaaaaaggggaaaaagaaagaaaatctaactctcataagagtcacggatccccaaagcaattttgcaaatgaagagttaatgatgttctccactcccctagatggcaggttgcttgcccgtaactatgcgtcaatgccaggcctaatattaatgtattatctaaataatcattcatactgcatatgatcagcactcaacgccttcctctcatcacattcactcctggtttgatccagtcaacacaaaaagctctttccagagaacatcagattagaaggttacacgtgttaattaaccttttttatagacaatgtacagcactggatatatcgtaggatcttcatctcactccatgggccctggtccaaggagcgagccccacagcggatcctactggccccctcctcctggtaaagacaaaaagatcaggttcccttcagtcttaggtttctcgccctccctgaaacatcccggtgttcagcaggtggggaaggatgaggtttgccacatccaggggctagtgtatttgcccttttgcctagtgctgtgggctcccaggagttctgcggctcttcctgctcacagccacacctgaacaagcatcctgaaggcaggtgggaggctcctcaggaagtgattcaggcaaaatgccttccatggaaagtgcctagacggaaacatctttatagctctgtaatgtaaataatcttaaagtcaaaatttcaacaacataaagcaatgtaaatgggagactgtgcacgaacgggatggagaagagattttagctgcacccagttgtacaaggatctggctaatagtgcaagcctcagcccacctagaaagagaggaccgaagaagggatggagggaggaagagaggacgaatgttcggacctctgtccagactttcatcacaaatgggtctttatctaaaagccagaagttagttaacagctttattgctgatggactttttatgttaaacacacacacacacaccccttactttatagcaagcaaccttcaaattatggcaccaaataggcaaaactgaagaaataagttttcccattatgttagtgttaattaatccacttcttccttcagtcatccaattatttattccacaaacttctgcgctattttcagagcagctttccaggtactgggaatactacgcgagcaaaggtgaaatcccttcctcaatgaggtccacattacagcaggtcacacagaccacaaacgcacacgatttcaggcagtggagggtgctacgcaacagtcactgctttacaaaaccaacctctggagctcagtcagagctttcattccctcacctcttccaggactgaaatcattatgctctttactgatcacgttattgatttttttactccttgggaagctggtccttcaaattcagatatctaaaactttccagtgtacagagtggagatgctgcatgtgagtcacccatgctaaaccaagtggcgattttggaaagtcccagttctgtattaaggggtctgggagatgttcacacaaaacaggaaatgcacacgcacgtgttattctttccatggcgactgatcagtgtggatctctaatctagccacggtgtgtcgtcaaggggaccgcacagacaccatggccccaggttaaagagtaagctctagctgtgctcacggtcccttatcaacctcctctcctaatccgaagcccttttgtttgcaccggggagctggctgctgtctgtggatatctatcagcggcaaatgcttctgttgcctggttactcttggagactgcacaggcctggggtggacagccggtcaaaacacgtaaagggacagtaactgtgtgggcaaagaggtggccctgcagacacatgctgtccttggtgctctgtgccaggaagacagagggccaacatggagcaggtgtgcgacgctgtgctgaaatctgccccctgacacatggtgtgcagacttgacttgatgtcgagaaagaggctcctggacccctgcggcaaccggttgaaaagggcctccgaggcagtggctcactcttctggccagagcttccagactctgctttggaagtggtctgctgagggcagtcatggtgcctcaccctctccagccaagggatgggcacaagaccgaagtggtggcagttaaacaatcagtcccctgaatttaaatcttgagcagagggacccaaggacaaaaaaaagaaccagcagccagagcatgtctcccactccctcccaccccaggcgggtcatcctgcagctctcctcctccctgaggctcccaatccctgatgcttcgctggccctcgccattggtccttctagcaaatccccttcccctttaggtggccagcaccaggttctgctgcgtgcaaccagagacctcacgttagtttcctccagccgccgtgacaaagtacgacaagccaggaggcttgaagaacaggcatgcacggccccacagtcccaggggccagatgcccaagctcggggtgtcggcagggctgctcctcaggtcacaggcaggctctgcccgtgcctgtccccggcttctgtggtggctgacattcttggtacttcgtggctcctagaagcaccaccccaatccctgccaatgttctctgcatccaatccccctctctgtaaggacaccagtcatagtagattaaggcctaatctaatgaccttgctttaagttggtcacctctataaagacctcgtctccaagtaagatcacattttgagggggctgggcctccaacattctttttgtagggaacacccctcaccctgtaacagactctgtgacccgcagtcaaccaccccacccagcagtggtgagcacctggaacctgcagacctggactccgggcctggggcacctgtgagccatccttggcatggttacattagccatgggcgggcgagcaacctgccttgagatctggctgaatggggaggcctgaaaatatgcacacacctctgtaaggagatggagtcaccccttagtgagggtgggttcatttttttaccagcaccctgggagctggtcattcctacgtggaaagtgaccttaggtgagttggaaacccttgagttcagtcaccaggctctggagatgggtcttctgaaaggtgagggttagggtgatggactccaggtggatcctccccatgagagaaaagcagggggcacgtgccatggtcgtacacagccctgctggctttttgggcctaactgtagatatgataatacaatgtgggaacagcgccaggcctgtgaactccaagtgcaccattaagggactctgattaaagactgacgccaacacagaggaaaaggatggagattcccaaaacatcggcagagttcctggacgtagccgttcctgaagctagaatctcctctcttcaattacacctgtcaagagctcccgtttttgctgaggctagtttgagctggttctctgtcatctgaaatctgaagatcgcgacacacataatataataccacggggcatagcaagccccaaggcctctctgagcccacggctatatcagcagcctcatttatgtgtcctgcagaacaaaaggagcaagtaaatgacatcccagggcccgagtttaccaagagacacgagtgaaatggatgataccgagacctgggtaccatagctggaagtgtgactatttcctcgacatttccaaaactcttgccaaacacatttgtactctacccttttactgcccttgaaggtaaacctggagccatcgctgaacccagcctggtactgaggccagcaggccagcatcacacacacttcccgacaggcccaggacagcactaatgactcgtttgactgtaactggcactgagacttcagtatcaacagagcccattccacgtcgacttgtctactttaaaaaataataacagaacaaaatgaaaccaacaaaatggaatttaaaatacataattgctttagtcatgaagagtaacgacattaagagccattttaactagacatttccgcacaaataaaattaggccgagacagttagtcttggggtcctgaccaaaaatgagccctgagaacttgcaggcctgtttgtttcaggttggatcctgggtaacaggcagggcctgtggctgactggagcagacgtgaagcccccacaaggctgcataggaggttccggggaacagagtccccaaacatcacaagttttgccatctctgtgcccactgttaactgaccctctttctttaaatgggcttgtgttttacatacataattatattgaaaaaggaaactacatataacacaaaactgttggttaattcactagttattttgtacataaattcactattcactaattgtacgtataattctctactatttttcatatatttatatataatatatatttgataatagagatggagtctcactttgttgcccagggtggtcccaaactcctggactcaagcgatcctcccacctttgcctcccacagtgctgggaatacagaaatgagccactgcacctggcctactagttatatttttcctaataattgtattttttccaataactacatgaccatagctagctagggtttgttgattgtttttgtctattttattgcctgtacaacactcttggaaatattgggctagttggcagatttaggcaatgcctccactaggctgatagtcgcaaaattctccacaaaaggcatagaagacaaaatttctctctctctgaccctgctcaatgcttagatgtaacctctgttcccagagctcatggcatcgagtaaacagttcttgcctactaagccctgcaggtaggaacaagaagactcatctaacagagaaaatgaaagaacagatggcgtggactgaggtctggggatactgttggggccatttccttctagtatcaatggtttcttatctcaacaaatatttgccaagcatctgtagtgtacaaaatcaggttgctgggctacttacacaaatacatataaaacgaaggtcaactgaatactattaaagactgaggtaattccatcctgcattattgaatttaaaaagcatattatgatgaacacacacatgtattcccctttagctttttctatatatttcaacacttatacaaatagaagcacttttattttactttaagttcttggctacatgtgcagaacatgcaggtttgttacacaggtatacatgtgccacagtggtttgctgcacccatcagcctgtcatctaggttttaagccccacaagtattaggtatttgccctaatgctccccctccccttgcccccaccccctgaagtagaggcacatttgcacagattctcgagtaatgtacacaggtagcatggacaagtatgttccctgctgtagtactgataataattaggcatggttaggggacagttagttaactgttgtcatctgtgtgtgcatctacatatagcacaattgttcatcaacagcagcaagtgccttcagtgggcataagctgcctcccataacctcttagcgctcaactccatgcacaccaagctggttaccaccaacacctgcatttctgtgcctgggggctccatctagctgagacccaagcctgacctacatgcagggcaagcaagacatgctggagcctccatgcacctgcaagaccgcctcagccaagtgaagagtgctggtggataaataccccagctccctcatccctcaagcagataatcccacggtgtacaccacagtctcccagaggttccacagcaggattgagtccccatcacccacagtggcaactggctggataacacacacccattactgacttcctgccctgccctgtctcacttccacactcccctcccaaaatttcctggggtcaccttcccatgaaaccacttttgctggaatacttatcttgggcttgctctaggagagcccaggctgagacactcagtatagctacactgctgggtgaaacacagcgatttacaaggctgaggttgggtgccaatgtactcataggaaataacaggcaaaggtctctaggaaatgttctggaaatggaaaatactaatctgcagaaaaatatagttttctttaaagcacatacaaaattataggacagagtttcacatatgtttggaaggtccaaactgatgacagtggttagcttggtagaagagtcaagatacatgagattttacaaattaaatatataaatttagtatgtaagtaatgaaaattaaaagttgcagaacagattatgtgtgtacttggacatgcacacatggagttgtgtgtccacatccacttttgtctatacacctgcctctattttacaccaagacgtgtgtgtgtgtgtagatttgtgtatgcgtggggaaaggtctgagaattctgaaaagaaacaccaaactcttcataatgattgccaatgggaattaggaacaggaaatatttatcaggtgattttaatgttttactttatacatctctgtgagatgtgactttttcagtgagcatctgctgcccttcaaatctgacaaggtaaaataattttgttttttcttttactgtactgatttaattcactttaactaggattatatttgggtttctttgagacggagtcttgcgctgttgcccagaatggagtgtcatggcactatctcagcttactgcaacctctgcttcccgggttcaagcaattctcctgcctcagcctcccaagtagttgggattacaggcacacgaccccacgcccagctaatttttgtatttttagtagagccagggtttcaccatgttggccaggctagtctcaaactcctgaccttgtgatccgcccacgtcggcctcccaaagtgctgagattacaggcatgagccaccacgccagccgacctatctgggtgtcttaaattgatacataataaatggacatattattggggtacacgtgatattttgatacacccatataacgtgtgaaagtcaaatcagggtaattaggatatttattacattaatctttttatgctaggcactttcaaattattctcttgcagcaattttgaaatgagcataactttaaagctgctcacacatactcacaacccctgtgaaagttgttgataacttttccaactcagatctgtgaataagcatcttaatatgttttattgacatagaggggcgccgagacctgtctggatggagggaaacgacagagccgttgagaatggtcattgtggatttagacaggaaatgctgcctttggagagattaaaatttagcagccactgaggtgtgcttcaggcagctctaacttcctccagactggagctactctcagagagcctcctcttccaagtcaaatgtgcagcccatctcagactcacgaactaggcccactctttcaaacagtcatgaggacctattttctaattgctctcccttcatggtgaaataattcaaacattccattcccttctagagtgagaacaagagctaaatttaaatgcaatagcttaatgatgcatctgcaattccaagcagccaacaatctatcaaaaaaagaccagctcattccaaatataggaaagactcatacacacatacatcactccactctagcttccaaccccagaatgaccaaaatttaaaaatatcaaaaaagtaataagccctcaaaataatctgcttgtgatccctaggaggactgattggcttctgtatcccataggccaagtataataaatgcactggaaaaaaattacaactaataacccacaccactcagttgaaacacactctttgaaagtgttcttaatgacacaatttgtctttttagggcatacagataaacatattgtcataaattatattcattgaagaaactgataccattatattaataatgaaaatgaaagggttttgaaatatttttcaggaatcttacccacctccaaggatgctgcctttactcattaagtgatgattagtggctctattgtaatgagaaacaaatgattaccaagtgtatatcctacattggaaagagttaagtttcacatcagaccttttctgccttcttctatggaaaatgaatgcataaaataggaatcagaggactgggtgtggatttaggtctactgaacacatactggctggatccattaccatcattatcaccacgactaccgccagcatcaccatcagctcctccatcaccacgactaccactggcatcaccaccatcttctccatcacgactaccgccagcatcaccatcagctcctccatcaccatgactaccactggcatcaccaccatcttctccatcacgactaccgccagcatcaccatcagctcctccatcaccatgactaccactggcatcaccaccatcttctccattaccatgactaccgccggcatcaccaccatcttctccatcacgactaccgccggcatcaccaccatctcctccatcaccacgactaccactggcatcaccacaatctcctccatcaccatgactaccagtcatcaccatctcttccatcacaactactgcttcatcacacctcctccatcaccacaactaccgccggcatcatcaccatctcctctgttgccacgactacctaccaccaaaatcatcaccatctcctccatcaacacgactaccaccagcatcaccaccatctcctccatcaccatgactatcagtcatcaccatcatcttctccatcaccacgactactgccggcatcaccaccatcttctccatcacgactaccgccagcatcaccattaccaccattatcaccacgactaccgccagcatcaccatcatcttctccatcaccatgactaccaccaaaatcatcaccatctcctccatcacaactaccaccagcatccccatctcctcgatcaagtctactgccagcatcaccaccgtctcctccatcactacaactaccgccagcatcatcaacatctcctccatcaccaggactacggctagcatcatcaccatctcctccaccaccaccacgcttactggaatctgagactcagactcatttgccaagcccaagcaggggcaccaaaggtccagctgattcatcttctgctgcgcgatcaaatgcaggtggaacagtcagtgccaccagtgcctagccagccatttccgggttgaaaacctttagtaacagaaagcagctgttattcttactacccaagattgtctcatgatcacacagggtgaaatgaactattgccctgagttcagatcacacctctgcacaggaaacctcaaaccaaacatttcacaaggaatgaagaaaccagcctagagttctctcctgaaccctgaacctgaccatcgaactgtggattttcccgtgtatttaggtgtcagtcgggtaactcaaactcaaaactgggcttcggcgcaaacctgaatgtgaatctccccacacttctactgctctctcagtctttctcatcctaggaaatggtcctccccttccaccatgcagcccacgccaaaaatatgaaggccattcttgtcacccccttgcactccctctcagcccagtctatcacaatggctagcaggtcctgctgccccaatatatccgggacctctccaatgaccctcacgtccactaccatcctggtgcaggccacccttgccagtcatgtggactacatggtcgccgcctaatcctctttgctcccacgcttacctccacctccattcagaactggaagtgatcttattaaaataaaaattggatcatgtcactctccacctaaaatcaatcactactctctggacattgttcttgagatttagaatcaataccctagcacagccagccctgaggtcctgaatgaactgccctgtccatctgtccccatctgtgctccagacacccagattttcaggcatcaagttctttcttgcctcagggcctttgcacggctgttccccatgatgttcctctctctgtgagggtaaggaacacatctgctctgtttactacttagtcctcttaattaggggacatacagttggcactcgataaatatgcctcaaataaatcaacaaaccatgaaagaacagacacagcccctaactgatacagaggaatactgcttctgagaaaagaaaggacgacttaccacaaagtttctctgctgagttcctggtctcaggagaggaagtgggaaatttccccagcggtctcccaaagcttgggtctgatcgaatgtggcctcagcacctgcaggcttcaggtgtggcgggtcatttccaagctgcgggaagaagtagacacaatcttctgtcaccaaagaatgacttgcaattttgcttgtctgcctccttcaccttccttgatgcttaagagccagggagaagcaggaattctgctaccattttccagttcagaacactgagggctgagtgagggacagatttgaaactgaactcatggtcctcccagcctgagatttttctttcccttcaaccaaatttcctggtatggaacagtgcaacaatacaacacagccattgacatgaagcttttgtgactccttgagtagaccatcaagttcctgaatttgccaaaagaaatgcacttagggctaattatccaggatagacagatgatagcaagggacagaattgagggcacaagtcaataactgggcatgcactgcacatatccttaattatcaagatgtgactgatgcccagccgatgacagaaagagttattataggtcaaattaattaataaaaataaatataaaaaccaacaagcatgctacacatagtaaactcttaaagaattcccaccttggccatcaaatattcaaaaacaaaaattcctgtatatcagtagaccttcatgttgacatgcacaatcaaaatatcagaaatttctttacttctgttttgctaaaaagagttattaacctgctcagaaccacagaataagatgataaattgaattaacttcggtttcatcaaaaagcttgctgatatcctgcatccatatgaaccagcaggagtgagaggaaggataaaaagcaagtgaggctttatcctagaacttggagctgaagaaccatctgtatggtcaaaattcaatttatttcaatttagcaaacatgttctgagcacctgcaaagttcctgacagctgttaggcccaagcatgagtaagatcaaggccttccaggactcttcgtctgacagggaataccagaacaggcatgcataatgttagttcaagctagaatctaataaaatttagaattttgtgcaagcaatctgtgagggaaacacatctaggcaggagactgaagtttattttctagagatatttaatgagggagctcaggactcacatgcagcaggtagaggtcataacagccaagtgctattatattgaaaacagaaattagacagtccacctgtggatacccctccccagatccaatgcattaagcaggtaggtggatgctacccctcaccactctcaaactaggcaagagactggaaatattttggtagaaaactacaatccaagagcaaagaccatgtttgacatgaggagattctacaacaaaatgtgttcagctccctcacagctaccctggagtgagctcaccactgacctcccccaacctgtcaagactatgctccaaaagcagtcttggagtaccaaggagtacagcttcatttaaaaacctctaatatggaagagtaaaagaacataatgataaaacccagaagagagagagatcatccagccaaccaatcaagctttaaaaaaaaaaaaaaaaaagcaacaagtctaacaagtatcttcagaaagcacataaaagtcaagaacaagatgctaaaaagaccaatgaaggacaaaaagaactcttgtgaatgaaaaagatagttgctgaaataaaaattttaatggcagatttggatgataaaagatatgtcccaaagtgctagaaaatattaaagataaaaagagactatcaatccaggaggtctaacttttaccaataaggtttctagaaagagaaaataataacaacaatcagctgactgatgcccagccaactacagaaagagttattgtcaagttaattaataaaattaacataaaaattaattataaaaattaatataaaaaatataaaaagcatgctacacataaactcttggggaattctcatctgggccaccaaatatttaaaaacaaaaattcctatatatatatgtatcagtagaccttcatgttgacataaacaaccaaaatatcagaaattcctttacttctattttgttagagtttttaaactgcccagaatcacgataaattgaaaattgtcagaaaaacataagaacatgttctagattaaaggatctctgagtgctctgcaacacagatgagaacagacctaagcaaagagtaccatgagattcaagaaggtgaatgataaagagaaggccctaaatacttcccataaccgttagaaagaagaggtggaattttaaaaaggaaaaaaatgggttagggcattagacttctcagcagcaatcttagaagccaacagaatgtctttaaaattctgattgactattatttccaacttaaggttctatacccaaaacaagctgtcagtcaagtgtgaggatagagaagagagattaccatacatgcaaagactcataaaatgtacctccgcagcctgttctttcttaggaaatgactggaagctgtgctgcagcaaaacaagtggggaaaaaaaaaagataaaagggaaagccacgggatccaggaaacaacaaatcctaccctaaacagggatagagaagaattccaaggtgacagctgagccttagctctcaagagcaatgggtttgaaacaagattacaaagagctttagaaataaagaatctagagaaaagagagactcaagaaaagcttttgatatcagaaagaacgggagaagagtttttaatatgtggattgcaaatggcacaattgaaaatcaggctattaataactccaggaaaactaaaaagccatacaacgaaagggatgtaaccacagtcactaattggtgctaccattagcaatatacacacaataacaacgtaacaactaagtattcacttaaataaagtagcaatttaactatgtgtatagactgggggagggaaactaagataactaaatcttcatttaccacagagcttcttaaactcagcagtgtgacatttggggccaggtaattcttccttgtgcaggctgtcctgtgcactatggggtgtttagcagtatccctgccagtagcaaccagaggccagtagcacacacgtttccctgaatcatgacaaacagaagtgtctcccaacgccaaccctgaaaggcaaaactgcccgctcaaagccctttgagaaccacttatctaccaccccagaaagtgctgctaatatttttttactttggaaaactggtaagtcaaaaaaaaaaaaagttacaatattggcaatttttactattatttaagagcttcaagaagaaaccactaaaagtattgaaagtgggctcaagggactgggtatggaaagaagagacagcacgagattgtttccatatacctttatacacttaatttttcaaattacatgcatgcactttcaagttataaactactgttgcagcacaaaagaaagcatgcttgtgtctggcttgggaactcactgaagtcttcctccacaaatctttctcaaaggaaaccttatactatcacattaacttacttgatatgcccatgtcttttctttaaactacatgaaacaaatagttatcacataaaaacatttttaaaaatctatacatctcctaaaatcaactgatgtaacaccactggtccacctacttcatcgtgggacgatttcagcaaaaaataaaagagacgtttctaaccagatcagatgggctggatgcaaacaaatcaaggcagacacctccagtgagatccctgcaggcagaggcacatcgtcgtcattgctgactacctccttttagtgcaaacccccaaatccttacctccaccaacacacatcctattctgctcctctaaggaatcatgttctctcagagaaatcattaagaataacatgaaaaaacgagattacaggaagtcacgataatctgcaagtgatgtacattttttttttctagttctattacagaagaaaaaattggggggtggggcaatgattcctggcttctcaatgcatttagtgcaggtcggtgccctccgtacagaacaagtaaacctaccgctttctcccctcatcttcctgggctgccgggatgtgctttttcaaccaccctgttctctttgctctggggcccctcctgtcctcggctcggcctactccatcgttaaagaggctaaggggctttaatatctcaccaggctgactggagagcttgctaatgatgatagggcataaaaaactactctgtatggttacatgtgaagtatgttaattattaattcaaaagtggtccagcaagttaaaggatttgtggggctgtgcataaccaaccctaatgagcccatgtaaaattgagtacagagcttgaagaccactttacacaaagttttaattaacagagccatttaggcagagaggaaaacaaaaacaatgattcattgatgtacgttttactgctgccgtggaacaccaggacacataaaacaccggccacctgctctgccccataaacatcttcctcacggagcacaggatcatgccttctgccaggagggaggagccagttcttgctatttaatgttaggcatagacgcagttcatttcatctgtttactacaaggtcctcgctacatagaataaaaaaagaaccccccaggtcttaagccagagtcagcaccctcacgttttgctgtatatttcaactaacagcggacctacatgaaattaaaatgctacaattatatctattgtctgagtatattcattatctaaagggtgttcaactttgtctcatcatttgagctcaaagaattgaaaatgttgcacaaaaattgaatacagagtaggaatttccacttgagatttcacaactttgaatggatgctgtttctaatgccagttctgtgatgcttaaactagcaaaaccaaactgttcccaccagaacggtgaattcctgagggaggaaagttggagggacaaataaccggacacccagcccttgcctttcctcctgaaccacatcctatcccgagtgtcccgcccacagcccaccgaaactgatcctcgagaccaagggtcttttctagcctgatacaaggcctgaggacagatttggaacagcatacccacagggtagtaacagtgatttgagccacaattaagacccaaaggtttagaaaccaggggttatcacaaccccttgaggctggaaatgcctcttcccacctctcagcccagaaaacaacccttgctctacagcccacagcctagaaagagattgatttcccgtctgtgtctaagctgtatctcattaacccacggggctctttccccagccccagaagcaggtacttacaaggcaccggagattagtggtctagtggaccagacagactggtccaggcctccccgccggccccccttccggtccccgtggacgccagcctctctgagcctcggatgtttgtgctcggcaccaggctggaaggctatttacttattcatgggctgcccaagccggccaggaactgctttgtgtcagctgaataggatggtaattcaatctgcgaatgggagccgttggcacacagcacgcctgtcataatgagtcacaggggggacaagcacccagcgttcagagccactgggaacctgtccttcgacaacgagctgtgtcacaagacaccaccttcctttcctcagtcgctctcttccccccgaatctccccacccctgatcaactctcctggagatgcatgacacagaattacatatccttgggagcggagacggggaggcgggtaatgccacctgttctcttgagctgtatacatggaaatagaggagacagaagtgttgggaaggaatctgaagcaagaaacgcggagtgaggaagcgggaggaaaagctcacctgcaccaggagtcctcaggtttaatgttttctatgccctatctcacacactcctcatcaaagcccttggagcaaatgaacaattagcctcaggcaggttaacaatcacacccgaagtctctgactgggggtctttgagccctggtccatctcacgtcacaagccacatgctgcctttggtccagcacgtcacatcatccaatgcaaagaaacctgcctctctttaaagatgactttttttttttttccagacaaggtctcattctgccacctaggctgaagtgcagtggcgtgatctcagctcactgcagcctcgacctcccagcttcaagctatccttccacctcagcctcccaagtagctgaggctaccagtgcttaccaccatgcctggctaatgaaaaaatatatatatttttgtagagatgggatctcactatgtcacccaggctcatctcaaacacctgagctcaagtaatccacctgctgcagcttcccaaagtgctgggattacaggcctgagccaccacacccggctgactccacctgtaaacaaatcattttctgtttccagtaacaacagagtctccagcacattaattaaagtcacagaatccagagcacacaaaaaaaagggagctgagattcagagatgagaagaccctagccaggtgacacagcccagctccccctgccccaggggaccaggcaggatggagcccatcccctgccgttctccttccagggtttcttgagagttaaggacatgcctttcatcagattgctttgttccagtctcaggaagctcagcagttcattttctccacatccactgcatgggctgctggttactgctgtagaaaaaccacaagccaggcgggccagcgcctggacctacctctgtccccattagactgtcactccaggaggggagggaccctgcttatcgtattctaagcacccaggagagcatccggccaaaggagctactgaaacacttgttgagatgccaaatgaatgaagtcttcaacctctctgttgccttcccatatgtagcagtgaggataggctggactctgctgtggttacaaataattctgattacagtggcttaagatcacctgggtgcattggtggcacctgccctgtgtctgcagctctgctccaaatcatccccacctgggacccaagctgacagaatggccaccacccaggtcactgcacatcagcaggaaggagaagctcgaggggatactgctggcattgagagctgcaccccaagacactggcaatttctgtgctctggacaccaattcgtgactcacaatgctatctcattgtggcacctgctactgtttccatgcatcatgcacaggcccagatggaaagatggggcccaggggtgcagtcccacctaacatctgaaagggacctgatgaatgcccacacatcttatcgtcctcccaacccttccccactctacattccagcttctgacttcactcccctgcattctcctactggggccccctacatccactctaccaccccctactgtcttctccacacagccaacttgcaaaacggaaatctatgtccctcccctgccaaagcccctctgccttccagcctccgagtgaaggttaccatgccactcgtgacctggttccgctaagccctcaaggttcatctcttgccaccaccctccatttccacgctttatgatgaactactccttccaagatctcaaacggagtctttggcctctctcggccagacctcacactcgctatcccccaatgaggctggtctatactccttgtcccgacatggctggctctattgtctttcaggcagatgtcacttcgcccaggaagccctccctctaagacctttcatctgtgttctcatgtcatctttcctccctactggcactcttgagcaccacacagattcctaatttcctaactacctattggtggtcctcacagaactagaaccacgtggagattggcggttgtatgtatcttatttaccagctggttctgtgcaggtgcgaggacccagctttgtttttttaccagctgaatcaccttgaacactcattggacctcactaaacctcaattgactcagctgtgaagtaggtataatagtatcccctaatccaagggcttcttaaatggactagatgaggtaataaccacatagctcttagcccagtgttgagtatgtgccagatactcgcacactattgaagaaatgaatggatggggaaatgagtgaacactaaaccatcagccagccccatgacatgagcccagcaaggtaggaatgtcagcctggcgttacagagagtttgggtgtggagtcagcactgcagagaacagcgctgagctatgaggagaaaccaagtcctgacagcattactgcagcccctggatcaagctgtaactgaagctggatacctacagctgggtttttcagttgtgtttcaacacattcccttttaggactaagtcaatataattaggttttctgccacttttagtaaaaaccaaacccaaaccaatacacacctagtaatgccttggggatggtgtcttgtcgccttgttctgggtacagaagagcagagaatcatgaaggtgtgtacgctatgcctattcagtaccatctctttggctccaggttgcatttgaatgttaaaatggtaaagtgttcatagcagtatatatagaaaattccacactccacagccatcgaatctttgcactgagatgttctgcggagctgcatcctgttttcctgcctctgctgcctcatcctgtcctcagatcacctctcagcagaggctaaagccccaccgcatctccccatcccatcaccatttaaaatgcttatcaccagttgccccagtggaatgggaggcctctgggagtagagtccttgttggtctcacagcccatggggcccctcccagcctagagcagtgcctggaacgcaggaaacactggattgacacatttcgagtgaatgaatgaatggatgcgtgcctgagacagcacatcggactggaggatccacaatgctttagtgtaattagtcatgcaattagtgagttcaagaagcagcccccattaaaatgaaagcaatgtaaaccaaccctgggaacatataataagagtaatgtgattagaaccaaagcttcaggccacagttaaggaatcctaaaattaatgaagataaagaattgatcaatgtatccctgcactgtctgccgggagcaaagggatttgtgggacttggttagaaccaaccctgatgcctaacagaatgaggtagagctgcgatgtcctggtgtaaatgtccttctgctaacaatgtcctctttcctatttgttgtttatccagaaaccttcaggcctggcttggggtaccttcctgtacagctcatgggaaaggagaggagggatgagcagattccctgggtcctgccggctttactgactttggttattaagaagataatattctggttggtaaataagttatttggggactttggcattgactgtgtagacagttgggaaaatcagccttcttggaatgcaaacttaatgaccatgggttctaatgtcctctgaacccagccccagctgctttggtatagtgacttcaccaacatctagttgctagaatgagatagtattggatgaataacttgtgagtcacgaaattggtgtccagagcacagaaatcgccaatgtcttgccttcttgatttctccagggtctccccggatggacacacattaaagccaccctgtttgggaatagacaccgattaagttcagcttagaattactcccataagcaaccaagatgtctttcataggcgaatgaatgatatatccagatactggaataactcaacacttttaaaaaataaattatcaagccacaaagagatatagaggagccttcattgcacatcactaagtgaaagaagccagtctgaaaaggatataaactatatgattccaactctatcggggtcccgaagccccgagctgcgggctagtaaaggtagcctgttaggaacgaggccgcacagcaggaggtgaatggtgggtgaacaagtgactgcctgagctccgcctcctgtcagatcatcaggcattaggttctcataggaatgtgaaccctactgtgaactatgcatgcgagggatctgggctgcatgctccttatgagtatctaatgcctgatgatctgaggtttcatcctgaaacctttccccctccccatctgttgtcttctatgaaactgatccctggtgccaaaaaggttggagaccactgaactatagtacattgcggaaaaggcaaaactatggagatcgttaaaaaaaaaaaaattagtggttgccaggggtgagcagcagggagggaataacaggtagaacaggagggatttttagggcagtggaactacagggtctgatgctatgacagagacacatttgtcaaaagccatagaatgcacaagacaaggagtaaaccctaatgtaaactatggactctagttaataatacaatatcaatattggatcatcaactgaaacaaatgtaccatagtaataataggggaaactgtggggtcaggaagagggggtgcttgggaactccctgtactctttgatcagtttttctgtaaacctaaaactgctcttttaataaaagcctggccgggcacggtggctcacgcctgtaatcccagcactttgggaggccgaggcgggtagatcacctgaggtcaggagttcgagaccagcctaggcaacatagtgaaacccccatctctactaaaaatacaaaaattagccgggcatggtggcaggcacctgtaatctcagctactcaggaggctgaggcaggagaatcgtttgaacccgggaggtagaagttgcattgagccaagatcacgccattgcatcccagcctgggcaataaaactccatcttaaaaaaaaaaaaaatctattggccaggtgcagtggctcacacctgtaatcccagcactctgggaggccaaggcactccagactaatagaacaagatcctgcctcaaaaaaaaaaaaaaaaaaaaaaaaaaccaactaagtatcacatttttttcaaaactgaccaaaaaagtacctcacccctttaattgctgttcttttgtacacagcaagtgtctacaccattccgggtcagtggatttcctcctggtcagcaggctgggctcattcagatgagtctgggcagctcgggggctgggactaccgtgtcctctgctatactcccagtccccgaatggcacctggctcatgggacccgcaccctaactattttgttgaatgaagtattttatttcttgtatctccacttagctacaaatgacagatcattaacaagtgaaaattgaaagccgagatgaaaacctcccccaggaaacgtagtcaggctgctccattctccagagatgtaaatcaataaaataattccagagagcttaagacgcttggatcactccataaattcctgacatatgagggagccctcaacttcctggcgtttctgttccaggaagtctaaccctgtggggacctggctagctttctagtcagttctagttggtttgaattattgcaggctgcacaggtcatgcctgtacactccgccccagaacaatgggcatctcacgatgttattctcgatcacagacatttcagccaccaaggaagatggggaacaaacacaccgcctagaaccaaccttgctgctcaaggaaacagctcagagaacaggacactccccggggacaatgtgtacctgagctcagcgatgctttgcatttaattaaacacacttaccgctcaagagcaatttcatcagcttaatcatcttacacgaaaattaattttgctcccactaaaggccctggaacaattatgtatggaaccttccatcacagattaagcttatcttcagcccaattatttctttattttcaaaccgaagttcagtgtatcgtgctattttctaaaataaagttatgttcagaatttcattttccgttttaatgctagttattaacactattcgtgtctgtaaccacagccaacattttgagagcttcctctgtactaagaaaggttcaaagcatcttactcaaagtgttcactgaagcttcgaaagagcccgtgaggtaggcactgtgatgacctgcgcttgttacgagggagacaccacggccggcccagagggcttcaggcacctcctggtcctacagcttgaaagacaaggcgtggggatttggacgtcggcatctggccccagggaccgcacagccactgggcttcacctctgccccctcctgtgccaccccctaagttagaggatcaacacagaccaaggggagagaggcagctgctctgggccaccaaggttttcaaaggaaaaattattctcttttcagatgtgaaagaaaagcctaagtgggcctttggaaacattaaattgataactttaatactaggaaactactgggaacgccatcaaccaaagaaagggcagacatggccctattaaagctaactaatgtcggcgtcacagccgtcctggcactcagcgctgtttctgtggttgggcaggagaaaccgcagtcttgccatcattttaactgattctaacacgtgccttggaatgccagcacagtgctctactcgcagccactggcaggcatgcagtcataattacgagatcacagaagggtcagatggtcccaagtcctcttctgtttgccattccaaggacagaaagctaaatcgtgagccctgaccgcactgcaagggccaggtctcccaagactgcaggaagccttcatctcatggtgactgccggacactcggcccggcatcacgggctggatttaggatggtgactgccggacactcggcccggcttcacgggctggatttaggatggtgactgccggacactcggcccggcatcacgggctggatttaggatggtgactgccggacactcggcccggcatcacgggctggatttaggatggtgactgccggacactcggcccggcatcacgggctggatttaggatggtgactgcagcgctttgcctttcttctgcatcataactgccgccctcaattcttctctgctaatcagcctcatgggcagagagcccctcattagtgcctgggaattaactgccgtgcaaaacagaaaaacaaactgcgcctgtgttgttcctggagtcctggggaaggaagaggtggccgtgctgagagcactccgggaaaatgagtcagcctcagggcacctcatgccccttatgcttggctggagagtaaaccaggaggacagagtggtcaacacagcaaggggtgccgagcgtggctgcaccgggctgggcccctcaaagccataggtgacaatgacagctcgccagggccatccgaggatggggtcatacctcagtgctgtacgtcattaatccccaccctgactctatagataagccactacccccattgtacagatgagaaaactgaggcaaccagaggtcaaatgctgtgtctaaggtcacacagtttgtaaatagcagagcccagagtcaaagccacgtctctggtgctaaagccatgtttctaaccactgtacccccagcttcctgccactagagcctgaaagatctttgcattggtactcagggctcaggggacgggatgtgggaatcaaaggcagaccagaaagagaagatggcttcccctccaggacaccccaaatgatgccccacactccagggagaggccctggctccggctgggactctgggtttagtttagttttgttttgttttgtgtttttttgagatggagttttgctctcatcacccaggctagagtgcaatggcgcgatctcagctcactgtaacctccacctcccgggttcaaggaattctcctgcctcagcctcctgagtagctgggactacaagtgcccgctaccacgcccagctaatttttgtatttttagtggagacggggtgtcgccatgttggccaggctggtcttgaactcctgacctcaggtgatctgcccgctttggcctcctaaagtgttgggattacaggcgtgagccaccatgcccagcctgggtttagtcttataagtcagactatccgactaggaataataacctttattacttcgacaacccacatcgactaacatgcatctatcctcttccaagcaccaggcactgtccacgatgttttgcttaaagtcactcatttaatcctgatagcaacaaccttataagtcaagtcccatcattatctccaccttggggataagaaaactaggctacacattgaagctcacaccagcaggtcacaggcaccttgatctgaaccaggctggctctgaacgggtcacgtgccctctcggccaggccacactgccgctcactgagagaggggctagaaggagggaacctgcttccctccgtggagcgccatcaattctttccccagaatggcatgaatttatatccccacctgctctggagtttgagtctcggactggacacattccaaatccctgcctctctaaacggcgatggttctccaacagctgcctcaggggtcctggctcagctggctgtgcttacacgaagtccccgcaacagccacctgccaacctgtgccaacctttcattttaagaggagagctaagccccggtgagagttcccccctgcacagtgacatgtaggcctcctgcctgtggaacgcagggagctcacactcgccctggccccgggtgcacgggccacagcagcagctccccactcccattggcaggtcctgtgatgtgtgtggagcatatgtctcctgtgtcagggagaggtgagccccacaagcgaccagcaggagaggatgaagggcaggaaggcggagcccaaacctcctgaggaccaggaccatggaagcacagagatgaaagccggtccctacagaaatcactgggccatggacaggcaccccatgggactggggacaggagagctgttgcctacagaaatcactaggtcaggggcaggtgccccatggaactggggagaagaaagaaatcactaggtcagggacaggtcccccactttacagataagaaaacaaattctatacatgcggagggaaagcaagcccacccaggctgcactctgcggaggcggggaccactgctccatgtccttccattcacatttattgaacacctgcgtgggacatgtgtcagtgaataacacggggcaagggtaaggtcctgccccaaggagcagacatgcccacagagcaacagaggcaagaaacacgcaagcagacaacagccagtttcagctcatgagagtgaaagagaacaaggaaactggagagcaagcagtggggtctgcgaggggcagcgattttagacagtgtggtcaaggtgggccccccaagaaggtgtcctctgagcaaagcctagagcagtgaagcggaggtggccatgctgagacagagacagagagagatcccaggcggctggcacagcacatgcaaaggccctgaggcaggagctggagcccaggcagccaccctcccaaaacagtgctcaccaacagtcctgatggacatgaaggattccgctctcactggcagaaaagctatactgtggattcaggggcctgtagcctctcccattgagacgaaggaaaggaagtggagaggcagactccctaacaaggcctcgaactcactcacacacacacacttgctacaagactggaaggcagagagggtgctgtgaggaaacacaccacgtcctgccccgtggttttagacaaattagctttcatgagctgctcagctcttaatccattagggcagacacgtgtcaccttggttaagagcaccgtaagatccagccctgagacgcctgctgcatttaaaatacaatcgcacatcgatctggactctacctgtggccgaattcattatccagtctgggaagattaaccatcacaaagaatctatataaatgggatgggaagattaaaagtatccttacttcgaggagccgtatcatcaagtgcaaattaatttgtgcaaggtagcacacctgcgtctaagcccagtgtctgcgtataaagcccaggaattacgggagacattttgaagccaagtgatcctaatcaccgtcagacttcaggggcagcaaggctagcgagtgacgtcggaaaagccacaggacagagaccctgagccctcaggagcatatggccacaaccactgcgttacttaggtatgtctgaaatcatcctccggcctgagaacgtggcacagagtcactgggcaaagcacccaacggctctggctgacttcacatgctgactgacttcaagggctgtggcccactgggtttccccacacaggccccttaagcagcacctgccagcggcaatgaccaaggacattctcccagttgggtccgggagccagcgcctagtctctcaaactgtgaaatactcaggaacactgtgaacccgttgttaagtcacaggtagtttgaaatcagttgtggttggagtgtttacaccacagaaataggcaaagactacaaatcagaacttttttttttttttttgagacagtctcactctgttgcccagactggagtgcagtggcgcaatcttggctcactgcagcctccgtccacctcccaggttcaagagagtctcccgcctcaggtccccgagtagctgggactacggtgtgtccaccacgcctggcaaatttttgtatttttaatagagacgggtttcaccatgctggccaggctgctctctacaaatcacagcttttaccagcacaccgctcccccaaaaccaacttctattatccagaggagaaaataaaccagaattgaattttgtatgctacagacattggagttactccctccaggcccctgaagttcactgctcttccccagcactggctggatgtgatatcgggttaaccagccagcaccttccacccctacagtcaggacacgggatgggcagagaactcaagccagttcaaagtgaactttaggattggagaaagtcatgccctctcccactggagcaagcacatagcctgggggacaaggtcaaagccattttgtggctacaagaggagtcggcgttagcccaaagagcagagagaaggatgagaagaaacaaagtcctcgctgatgacattaagtctctggatcaaaccgtgcctgatctcttccttatcgctggactttcaggttatttaaacttacacatgctttttatatttaagccacttggagatgcactttctttgaatagaaagatttcttaccaacagaaatctgaaaccaactctttacagtttagtcttccttgcctaactaaatggattcattaaagctcttttcagttactaagtcactgaatagctttgtttgcactcctatgcttttaaagaaggaaagaaaaaacccagggaacaacactttgcgtttcacccaagcattgaaatctgtggtgcggcagccagttccctctccacctccctcaccacctgcctctccacctccctcaccacttccctctccacctccctctccacctccctcaccacctgcctctccacctccctcaccacctgcctctccacctccctcaccacctgcctctccacctccctcaccacttccctctccacctccctctccacctccctcaccacctgcctctccacctccctcaccacttccctctccacctgcctcaccacctccctcaccacctgcctctccacctccctcaccacttccctctccacctgcctcaccacctccctcaccacctccctcaccacctccctcaccacctccctcaccacctccctcaccacctgcctctccacctccctcaccacttccctctccacctcccttgccacctccctcgccacctccctcgctacctccctcactactgcaaaagggattgtttcctccagctcctaatggccctctgctcccatttcctcctcgaggtcctgttttcagatgctttcttgccccaatccaaggtcgcaagcacacgcatctccacaagaagaatgacaaccaatcttagaggtatagggagcttcaaatttaccccattgtcaggaaaagagaagccctatctaaaacttaaaattgtacaaagctagagttggaaaaaaatcgttgatgtcatctcctacagggcaagagaaagccgcctccaggggcgaatgatttattgcaggtcgcacaactcacacacagagtccctgaaccagggctgagaacccagcagttcagactctgcagccacgacacacaggcgccatgggcatgacagtgggtgaggacgcccagcagcccaggagccacattggtgtttgccagctgcacctgctccccatctcctggcctagaggcccagccttagcctacgcaattctcacgggacagacatatgcatgtgaggcagagtggggacccatcttaaggggcctgtgggtcccctcccctcagcatggaaataaaggaaaatcttgggttccttcacggggaattccaggcacctaattggccctgggaagtaaataagcaacttgagaaggaaaaagctaatagtattcaagaccagcttagccaacatggtgaaaccctgcccctaataaaaatacaaaaattagcgaggcgtgatggtgcacacctgtaatcctagctactcgggacgctgaggcaggagactctcttgaacccggggggtggaggttgcagtgagctgagatcgcaccactgcactccagcctaggtgacaaagcaagactgtctcaaaaaaaccaacaacaaaaaagaaggtaatagcagcttaaaacaacagccaagggagttagagtcaggagatgtttgcttccctatagaagctaaagcatcatcacatctgtctctgggttgtttttcagaaacccagacccccaccaaaatggattcacctgcacctagacctcagctacggagagcggaggactgagctctgagcaccagtctttgttctaaatttcttcctgaggggcctggaggaggtcacacccatgagccagagctaacattcttttctgctgaccctaaatttttacacaaagtttctcctcctaaccaactacaaatcagaaaatctttgcatatacctacaatttgtaagcccctgcatccagagatcccaccctttaaatcaaaccaatgcataacctccatgtattggtgtgtgactttgctggtaacctctacctctctgcctttaaagaccctcccctttaagccatctggcagtccgggtcttccacataaggttctccccgctagacgccctgcactaaatgcctctctttctcatgctgcaaacctcggtgtggctgtttggcccgactgcagtgggtgagttggaccccagctccgttggataacacatgcacacacgtgtgcacacacatgtgaacacacgtgtgtacacacccgcctcacgtggtacagaaagccaaagggcatgtcaggagtcacgcgctgatcatcaccgagcagatacatccctagattatgagttcctaaacttttacacatctttcttttctaaattttcaacagtaaatactaaagatgaaaaaatgtttctcacagctgtcaagggaaaaggggaaatcccatttcgtgcgccactaatggaagaggaaacagacacgaactctcacttctcaaatgccctaaaaacatggttttttgacccagaaattccaccttcataaatttatttaaaggatcataatggacaggactgaatcatcttatcttttagaattacacacataaggtattcattgtaaaaaaaattgaaaagcataaaggagaaaataaaaacttcgtaatatccccttaaaatacattccatctgtatgcgtcttctaaatcccccagcaaaatcaaattcaagctatatacatctgatgttatccatgatgattttaatgaggtatgtgtttttctaaattattttctgtgctttaaaattttttctacaataaatatatgttactccattaatcataatcaagttaaaaactatctaaaattagtatctttttttttttttttgagacggagtttcgctcttgttgcccaggctggagtgcagtggcgcgatctcggctcaccgcaacctccgcctcccgggttcaagcgattctcgctcctcagcctcccgagtagctgggattacaggcctgcaccaccacgcccagctaattttgtatttttagtagggacagggtttctccatgttggtcaggctggtctcgaactcctgacctcaggtgatctgcccgcctcggcctcccaaagtgctgggattccaggcgtgagccgccgagaaacggatcgcacatggtaatttttgcagcaccacgggttaaatactgtgggccctgaacaccattttcatgtggattccatgatcctcaatgacctcctgactcagaggcacgggagcagatctcccggcttttcctgcccttcgtggcggccgataggctcagtcggaggtgggtatggaggtgggtacggaggtggcaggaggaagctatggacaagagagcaaccggagggacagaaccgtgccaagcgcgtgtgtgactgcaaagccagcctctaggccaagtaaggcgctggaatgtggggcttgctgcgacgtacgtttctctcctcctcagcggagagatgagtgctcccggccggaggccgctccgctccatgcagtgacttagagacccaggcccctccctccgtggccgcccaacccctggggcctcatggcctccgcatccagccagtggggtactgggaagggcggcgccttcccccgactcagggctccactctcccattggccagaacaagccacgtggccacccagacccaagggctgctgggaaatgtgcccctccgctgagaagtggcttcccacagccgttctgtgcaatggggaaaaatccggggtgaacggctagcagactcttccttggagagacagcgcgggccacataggagacccccaaacaatggataccccatgctaggaggaccaactcactcaccctggtaggcctggattttcccactttcagccctggagatcctctcagccctgagaaaatcagagatgtggtctccctgccccctgctcacagtttcaccaagacagcacccgaacagggaggggtgccctgctaccccagcccccgaagaggacgtgcgggtgctgggagtactctactcagtgaccccagcacttcacactctgcgggccctggagaagctgccccacctcccttcaacccataggctcaggagactccaaagtcaagccttgtctgcaggtcggagattcaacaggaacaagcggtacgagactctcagagatgagggaggtgcagagtatattgttgaagctgaaaaaaaaaaaccaaacctgaggacctgctcctccagtgtggggtgaaccctcggggagacgcagtggggactcgcaggcaaccaaggaggcagtctacacagaaaattgcggctgctgccttgcccccagcaccaagggggcttggtgggcagcttgcaagctgtccaaagggtacatttctgcccttcatgtgcagcgtggtccctgggtgctgactcgtgcccaccttccccagcagccagctgccgggtccattcttaaaaacctccaggggacatctgggcacccttccgaaacgtgctgccagctcccagcctggggctctaaatagaactgctcttaacaccgcatgtgtgctcttcctactccagccagccttctgctcgttgctaccactttgctaaatgcaagcttctcacaacacttgttttctttatctgtggattcagcagggaagccctgccatagggcgtgacccagtcacaggggcctgcccacctgggggctccgtgtcccctccagcagcacatgtgagcggatgggtccccagagcatgctcctgtcttggcatttgaaatccgccgtggaagccttctgaaaattgtgctttcaaatacaaatactgacctcagtccaagcccagatttactctaattgtctgaagacccctttccaccaactcagtaaacaagggagactctgagttgttttcttaaccgatcattgttttctggggggcaaagtggagcgtcgggggagagatttttcccctcaaaacaagcaattgcttttataatttaaattaggcctatgccctaaaagaaaatcgctggtaataaatgcaagcctgctgaccttggaggaaaatatcagagagatttcaagcagcattttcttgaacaaaaatttacacagccttgttttttttaaaaaaaaaaaaaaaaaagaaagaaaagaaaagaaactgctttgtaaatgtcacaggaaggatgcttggcggaggctgagaaagcttccgagccacttatttctgttgagaatgaagaactacagcctgggtcaggactgaggctccactcctggcttcttaaagcatctctacctccaagcaaagcttctcagggatgctttctgcaaaagaccaacatctggggtcccacaaagctcagcacttttcaattttattctgcagggcactcaggcaggtgtgagagagatcagcgggccctgctggcggcctgaggagacctcagggggctctgaaagacaggttccaaagcatccattgttagaggggaacgtaaggactatgatgacatagatggcagggcgatggcgttgaggaggctgtcaacatctcggagttcttcccatgtgcaaggcagggtgctgagcctgtgatgcgtatgtatgaagccgtgtcatgctcaccactcccctattgagcaggtgagatggtcattcccactttatagaggagaaaaccacgggcagccctggagcctgcccacggcacagccgtcctggcatggcggtcctcaggctaatggaaaacgcagcgatgaacccagaagaaagcaaaacttcacctgggtgggatctggaaacacccttcgagctgaatcttttcatgtctgtgtgtcttttcaaagaaccagccctttgtgagagtcttaagttaaagatttctagtgatgcacattcatgaatttaacacatttcacattatgaatttgtgcttggaatttaattatctgcaggattatgtaccagctctactcttcgttgagagactgaacaagtcctgtgtcttagcagttatcatattatagcttttggaaagctttttgatgttaaaaaaaaaatgtttaggaattaaaagcattttatttcatagaagttttaaaaagcaccaggctttgaggttgtttgctggttctgctgttgtctactaaatcattgtgttctgcttttctctttatttactcttccctcctgcctcagctttatcttgttagtcttctggtttctagcattgaatgttttgattaatttgggttttttaaatactcttcttcatataagaggatctgaagctatgtattttccttggagtgtagctttggcataaccttatgtattggtatatagcaggacccaggaaactatgtagcctttaggccaaatctggcccaccacctgtttttgtaaatgaagttttgttggaacacagccacaccacttgtttacatagtatctatggctgccttagtatatggcagcaaagtttagttgttgccacaaagactttctagcctgcaaagctgaacatgtttaccatctgacttttttccaaaaaagtttgccaacccttagaatgtaagatccttgtccttaacttctaaatggcttgtagttttgtttccctctttggtgccctcactttttcatctgttacgctcatttttgttaatattgtccaatggttagatttgcagagtgggggtttctattatcaatttcttaaaggattatattgggccgtatctgcattcccttgaggatatggagcatctcagtggtcttgcagggctcttaggttttgccatatgtattatattgttttttcattgctataaagaaatacctgaacctgggtgatttataaagaaaagagttttaattggctcatggttctgcagggtgtacaggcagcatggtgccagcacctgcttctggtgagacctcacagaacttacaattatggtggaatacaaagggaagccagcacatcacgtggcaagaatgggagcaagagagcaaggggagaagtgccacccttttaaacaatcagatctcacgtgaactaaccaagtgaggactcacaatggtgctaagccgttgatgagggatccacccccatgatccaatcacctcccacaaggccccttcccaacagtgaggatcacattttgacatgagatttggagggggccaacatcccaaccgtatcattctgcccctggtcccccaaatctcatgtccttctcatattgcaaaatacaatcatgccttcccaacagtcctccaaagtcttaactcattccagcatttactcagaagtcccacgtctcaagtcccaagctctaagtctcatttgcagataagttccttctacctatgagcctgtaaaatcacgtcgtttacttccaagatacagtggtggtctaggcgttgggtaaagattcccattccaaatgtgacaaattggccaaagaaaggggcaacaaggcccataccactctgaaacatagcagggcagtcattagatcttaaatctccaaaataatccttgactccgtgccccacatccgggcacactggtgcaaggggtaggctcctgtggctttgcagggtgcagctcccacggctgctctcacaggttagagttaagtgcctgtggcttttccaggctcagaatgcaagctgttggtggatctaccattctggggcctgaagggtgaccctcttctcaccaactccactgggcagtgccccagtggggactctgtgtgggagctgcaaccccacagttcccctcagcctgtcctagcggagcttttctgtgggggctccacccctgtggcaggcttctagcttggaacccagactttcccataaatcttctgaaatctaggtggaagccaccaagcctccttcatgcttgcattctgtgcacccgcaggcttaacaacatgtggaagccccaaaggctaatggcttgcaccctcagaactctggcccaagctacacccagggtcctttgagctgaggctggagtcagagtgcccaggatgcagggagcagtgtcctgaagctgtgcagggcagcggggccctggacctggcccctgaaactattctttcctcctaggcctctgggctgtgatgggaggggctgcctaaaagatctctgaaatgcatttgaggcctgtttcctgttgtcttggatattagcacttgggtcctttttagtcatgctagtttctctagcaagtagtcactccacagcctgcttggattcctcttttgaaaatgctttttccttctctgccacatggctaggttgtgaatttctgaaacttttatgctctgcttcctttttaactataagttccaactttaagtcatttctttgcttctgtatctgagcataggttattagaagcagccaggtcccatcttgaatgctttgcttcttagaaatttcttccaccagataccctaggttatcactcttttaagttcaaacttccataaagccctaggacacagatacaatgcagccaggttctttgcttaggcataatatgggtgatctttactccagttcccttaactttctcatttccagctgagaccacatcagcctggacttcactgtccaaatcactattggcattttggtcacaaccatttaaccactctccaaggagttccaaacaattcctcaccttcctgtcttcttctgagctctccaaactcttccaccctctgcctattacccagtcccaaagctgcttccacactttcaggtatctttatagcaatgccccactcctctgtaccaattttccatgttaggccatttttgtattgctataaagaaatactgaggctgggtaatttataaggaaaacagacttgattggctcatggttctgcaggctgtacagaaaacagggtgcaggcatctgctcagcttctagtgaggcctcaggaagcttccaatcatggtggaagacaaagaggagccagcatgtcacacagtgacagcaacagcaagaaagccagggaggaggtgccacacacttttcaacaaccagaattcacatgaactaactgagcaagaactcacttatcacccagggatagtgcccagccattcatgagggacctgctcccgtgacccaaacacctcccaccaggtcctacctccagcactgggatcacatttcacatgagatttgggggagacacacatccaaaccatatcaacataacccagcaatctggatgcagaaaacacacaaatgacacactagaggtctctacagggagagaatggggtgctggacagaggacaaagaggagtgtgccctaggcggggcagcaaaggcctctccagcgtgtaacatcgccccaccctgccagccagcattacttccctgttttattttcttcattgctcttgctgctgtctgaaattacctcgttatataccaactgtctgccactctgtgagaatgcaaactctgtaaggaccttatttatcttgcctgatgcattgtaactattcaaatatctgtgggagagaggaagacaggacctgaggaggacacatgagagggaggaaaagaccaaggaggggtgggcagggcggagagtcagagaaacaccagcagtggagggaggctctggggccatagaacaggccccaaaccattgatttccactttagggaatttattgagattttctttctgaactaaaaatatgatctatgtttgtaaatgttgcatagacacagaaaaaaatgtgtggttactacacagagcgaacagagttcaattattcaaacattcacacacaggcacacacatgtatatacaggcaaacacagatacatatgtgcacacacacacaccatcaacttcagctctccctcagctcctcgaatttgcccttgtttggacaccatcttgaagccagccagaatgaaaagggagggacgttggcttcagacagagcagctcaggtcaaggcacaggcgacgggaatgtgggcggaggcaccacgcagcccatggcagaggagacaagagggaagatgctgggagagccaggagtgaaaggaggatgctggtgggagcgctgtcctggaatccagcccttctggggaatggaggaagctctctcatgtccatcttagagcatgggttccagcaaggccggcctgcaggcttggggctggggacacggtggagggtggggagaagggacatggccagctgctctgccagcagaataaagagaggtttctgtgtgggccccgggagggccaggagcgagagagcgagcctcggtttgtctaatgttctatggaagatggttcttaaaggggttgggggacccggcaagaatcacaagggagccatctgagaggcaccttccctcccacaggggaagggagggaagaggaggacgaagtaggatctccagggacccctggcaggcaggggctagaattctgcccgtcccagtggggctgggccagctcctgacagcgtcatacagagagaagctttccctttcatgtcccctctcctgggactaagccagtgcatttgtgtcctgaggcaaacaaaatgccacaaaccaagtgtcttaaacaacagaaatttcctctctcagctctggaggctggaagtctgagatcaagcagccccagcaggcctgtttctttctgaggctgtcaggagaatctgccccgggctccccctgactcctggcagcctcaggcactcctccgcttgtgagcgacctccccgcgtcttcacaccgtcttccctccacgtttgtctatctctgtgcccaaacttcccctttctaaaatttttatgttattaactttctaaaatttatgtactaaaaaaaaaagcaagatctcattagccgggtgtggtggtgcacacctgtggtcccagctacttgggaggctgaggtggcaggatggtttgagcctggggggaggaggttgcagtgagccaagattgcaccactgcactccagcctgggcaacagaatgataccctgtcaaaaaaaaattaaaacggtctcactctttcacccaggcaggagtgcattagtgtaatcatagctcactgcattgaactcccaggctcaagtgatcctcctgcctcagtctcctacagacctgggactataggtgtgtaccaccatgcctactatttttttacatttttatttctagagatagggtcttgctatgttgttcaggttgatctcaaactcctgggctgaagcaatcctcccagcttggcctttcaaagctgggattacaggtgtgtgtcaccacacgtggccaaatttccctcccttaaagaacactagtcatatgggatgagggcacatcctcatgtcctcatcttaactttgcccatctgcaaagaccctatttgcaaataaggtcacattcacaggtactgggagttaggacttcaacacctttgtgggatgggagggccacaattcagctcataacagccaggaaataaagcagagatcaccccctctacacacactgcaggctcccagccggaagcaggccccgggaggagaaagaaaaagttctaagttcagacgaggtcagatgtggtttggatattctcataactaaactgatagagcttgggggatggaagacagagaaagatccatcgtcgaagcaatgcagcggcatccaccggcacctccgtccagggcacaggggagaagtgacccgcagaagggctgtgcgggggcagtgagggcagaggatggagccccagctgcggggggcagtgagggcggaggatggagccccagctgcggggggcagtgagggcggaggatggagccccagctgcggggggcagtgagggcggaggatggagccccagcgcactgggccccaggtcccgccttccactcaaacattttatctcgtttcagtgtgcgatccccaacctctgatgttacacggaaccagctacccaacgagttgttttttacatttcccttttggtgttctatttatctggccttaaacaggcctggctgagaatatttaaaatcagagaacgcacggctggacacaaggcaaaccgtattccacacgcgcatttgcttaggagcagagttcagcaacgtgacgctgcctcccaagggcttgggttgttcccccatcctctctccacgactccgtcccaccttcccagtacttaaaagacgacggcagtaaccaacaatgaatgccccagctcaggagagcagctttgtgaccggaaggccacggcttccaggagcctgaggagggaaggtcagccctgaggagggaacagcacaagccaggctcgcgtgttgacatgaagggttctctgagcccagcctgagcaaatactaacacacaccgcctgtgctggctactgtctagcagccactggtcccgaaactccacacagtcaggccatctctgaagccgccaacacgcacctaccttctgggcaagaacacgaatctgtcatttgcactcgtgtatttgcaatcggtgcgaacactcacagtctctatgctgcatgtggggaacacgcagccatttcaactatgaaaaaaaagaagacggcagacaacagtttaaaaaaaggagaccaggagcatcatatttcactgagtaaattgacaaaaggtcaaaaagcttgatcttggccactgatgtgcttggtctgaaagctaaactgccacttaaatattcataggcaagcgcggtagctgcagcctccggttgccctgagtccacagaggagcaaggctggggccattttatgagaaaaaacaagctccctcccgagccgggttctgggcaggagaggactctgctcctgcaaccagcccgcacccgctgagccttcgttgctgtgtcctgtatcccagaagaatgtgagtgatggtcttgcacagggaggcgggtggcaatagaccaggcggagatgcaagtgcacaacgtgagaaaaaatgctgaaactctcggctctaaaccatgctcttggcatcctcacctcactcaatctcccttcctccaccatgccaacctcccttcctccaccatgccaacctcccttcctccaccatgccagcctccctccctccaccatgccagcacagggactccccgtaaatcatcttcatccccctttgtggaaagactgaagatctgtatatgacaaggtcaagagtgggctcacccagtgctatccaagagaaacaccgtgtcagccacctgcataactttacactgtctagtggtcaccttaaaaaaagtggaaagtaacagataaaactaattttcatattttatttcactcaatgtatccgaaatattaccatttcaacatggaatgaataattaaaattattaatgtcggccgggtgcggtggcttatgcctgtaatcccagcactctgggaggccaaggcaggtggatcacgaggtcaggagatcgagaccatcctggctaacacggtgaaaccccatctctactaaaaatacaaaaaattagccaggcgtggtggtggcgcctgtagtcccagctactcggaggctgaggcaggagaatggcgtgaacccgggaggcgtatgttgcagtgagcccagatcatgccactgcactccagcctgagcgacagagcgagactctgtctcaaacaaaaaaaaaaaagtggaagtaacagataaaactaattttcatattttatttcactcaatatatccaaaatattaccatttcaacatggaatgaattaataattaaaattattaatgccggccgggcacggtggctcatgcccgtaatcccagcattttgggaggccaaggtgggcagatcatctgaggtcaggagttagataccagcctggccaacatagtgaaacctcatctctactaaaaaatacaaaaattagccaggcatggtggcatgcacctgtaattccagctacttgggaggccaagacaggagaattgcttgaacccatgaggaagaggttgcagtgagctgagatcttgtcactgcactccagcctgggtgacagagcaagactccatctcaaaaaaaaaaaaaaagagttattaatactattttacattctcttttcttttcccgcacagggtcactctgtcaccatggctggagtagtggcacaatctcggctcattgcaacctccacctcttaggctcaagcagtccacctgcctcagccttccaaagtgctgtgattacaggcgtgagccaccacgcccagcccattcttttactacgtcttcaaaaatcttaacatgacacatttctgttcagtcaagccacagttccagagctcgatggccacaggtggctcctgtgtctacgagacaggcagagggccaggctagtgctgcaccatgcattcaggaagggagcaggaacctcctctcttcattctctacccttctctctggaatctcatgggaatctcctctcggtgactgttcttattgccacgtgaacaacggaccaaggaggatggaggtctctgaggaggggcaggattctggtgggaaccgtatgaggggaaactgggagacaggcatggcctgaaatggggtcgtgaatatggagaaatctggacgaagctggagcctcagggttggaagagttgcggtctctgggctggtgagcacagactccagctgccttgaactctggggcccatgacagaaactactctcctgccccatgctggaggctgcaggagtggggccaccctgcctgcgcccccaccccaggttcggctctttggtgggtgaggtgggggccttccctggaccctgtttctctgattgagcatttgacgtaaagacgccagagccccttgaacccatgtgcaatttcacatggcggcacgcaccagggctctgaagtatcacagctggcgtgtcacgcaggccacctgcatcatggccaggcagacttgtattcagacacaccacccacctgccctctacaagccccatgatgttgaaaatgacataattggcccagcacgatggctcacgcctgtaatcccagcactttgggaggccaaggcaggaggatcacttgagcccaggagttcaagaccagcctggccaacatggcaagaccctgtctcaaaaaaagtacataatatctcagattctcaattttcttaccttaaaaccagaataactgccgcggtggacagctgccattcgcagtctgtattccagcagccatgcctcctcttggtggcaaggacacctagctttccttgtggactaatctattgttcctcaactgagtccaggtgatctgggtgcccctgctgcttagggtcagtcatgtgaccacaccttagccaatcggagggtatcattctcctgggcacagtgattggctcagggctagacaggtgagctgagctggtaattaactagtaattaactagcctcagcattgttgtgggagttatacaaaaaggctcctttccatggccctctagcccagaagcatgtgagccattggctgagaagtgcagagagaccaagaatctacacacagtatttgagctcctaaaccattactggtcatatgacccctttgcacaaactaaaaagaggtgctgaccgctgacaactgtctagtgaggtgagcaaatctgcagtgctgtggtgtgtgtagcaggcgttagcatctgatgtggcataaagcttacgtaactacacgcaatgaccctatcagtgcccagcctctgacaggtcagtctcactaataaattcccctctctgcttaagcacagtttgggttagagttttggtaactgatgaatcagagctgatgcaataactacggtcagtgaagacaaaatgaagccacctagataaaaacccaagcctcgcacctgcagagtagccccttcatgagtatgcatctctgttcccggtcacgactgtggaaatgaaggttccagaactctgaaagtctggactgtgttccctcttctctgcactatttctgtatgtgtcacatgagcaagacccttaggagctctgagtctcagctgtgcaggactgaaatcacctgggcttacctacttggagggaatggggctgcactaggtgcttctgcaggctgcagctggccccacgccccagcaggggtcacacggactccattgccctgagcactccctcccaggtgcattcattcccgctcatcacacaagacctggggtctccaacaaattccctaaatttcaccctcaatccagccagtagctgacccgtcacgctctggggagaggtcagtctggggcaattctcgccaatgtgaagggtgcatgagggcttgcacagttcgagtctcgcgtctcctccttggccaggcttcctgcttatgtttcctaggccagccagtttcagcaccaagccacctgggaagcttttaggaatctggaggcggagcgcggtggctcacgcctgtaatcctagcacttttggaggttgaggcgtgtggatgacgaggtcaagagatcgagaccatcctggccaacatggtgaaaccccatctctactaaaaattcaaaaactagctgggcatggtggtgtgtgcctgtaatcccagctacttgggaggctgagacaggagaatcactggaacccggaaggtggaggttgcagtgagccaagatcacacccttgtactccagcctggtgacagagcaagactccgtctcaaaaaaaaaaatctggataggctgggcacagtagctcacacctgtaatcccagcactttaagaggccaaggcaggaggattgcttgagcccaggagtttgagaccagcctgggcaacatagcaagaccccatctctaccccacaaagaaaaaatagctgggtgtggcggtgcactcctatggtcccagctacctgggaagctgagttgggaggactgcttgagcccagaaggttggagcttcagtgagctatgatcatgccactacactccagcctgggtgacagagtaagaccctgtctaaaaaaaagaatctggatgtcccagctgttccataggataattaaccagaatctctgtgggtgggaaagaaggcacctggatatttttaaaccatcccaggtggttcccacgtgcggccaagtttggctctaacaccttcaaccagcaggttctgcaggcaggaggggccggctgggttatttttgccaagtatcaagaggataacagggtggagggagggctgggatgactgatggtcagaggtcaagtatctgccaccttcctcccctcctgctccaccccctcagaagttgctgtcaaccatcctaaagacagagaggagacagccctgtccatgcgccctgagacagcctgggagggggccaggcacctgttgacagaatttctggcctttcatggattcaaatccacatgtctggccaaagaataaaatagtgatttcaactaggcaagttcagcagcagacagaaagcttttatttcttaaaattgcctttttttccactgaaaacaggaagaaacacaactaagagtaaaaattaggtttataaaagtacaaagtgccagaaacataaatagatgactcaccaaaaagacactaaaatgccactcaaaaaatgaaaagatgttcaacttcacctgtaagaagagaaatgcaaatgaaaactacactgagatactctcaaactggcaagttacccagcctagcagcaccgtgacatgggtgtccccagacgcctctgagtggggtaggagtcagaacggaacttcccgctgggtactttaacgaagttttgggttcactggcttcctgactggcaaccctgcttctaggaatttaccctcaagacaacataaaaatggcctttaaagatatgcaaatacatatgcacaggttattccataccggtttgttaataattgtgaaataccagaaacagcctaaatgctcacacatacgaggcaggttgaataagcgctgtcttcacacagcgaagaactgtgcaggacctgaggaggggagatctctgtgaagcattgtggagcaatttccaggctatattgtgggttttttttaaaaaatctattgttttaattgacaaaaagaattgtgtatatatgtattgtatatctatagtaacccctaggctcaaaaaaataaaaataaaaaagaagtgtcaacaaatactgaaccccacttggtaaagtcttttcccctaggattaagcagataaatatgtatgttgcctaaaatagaatccaggtttctcagtctcagaggagggagttgaaatacagaaagaggagaggctggaataaaacatgtgcggttaaactggatttgaaggcatcaaatagagataagttggaaatagacacagaaatacacacacacatgcacacacatatgcacgtgcatgcacgcacgcgcatgcacacacacgcacgcacgcacgcacacacacgcacacacatgcatgcacgcacacacgcacacacatgcacgcacacacacgcacgcacacgcatcacacactccccatcctggctctgtcgactacaggacctggaggtcatgacacctcggctgtcatgagcactcctcacacccagatcttgatttctaaatatcactcgccacccagagaagcacgggctccttcaggaaggggctaactctacagctatgtcagagaaagtataggttgatcctacagcatctcatttcatagaaagtaaagagggactcagaaatgacagccacgtgtccaaaagacatgggaaccagctttgaaggagctcccgctgacctttcaatttcagctttaaaataatggcaataaatttaaccttggaataaaataagaatccatcagtccatactgatataaatgaacataaataaaggggggcggggcagggaaggctttcctgccaaggatgggcccattcacagaggccggagggacaacaggaaaactgccccttgtactaatcaatcaaccggaacagcgagctgtctggaccagagccgccctcagcaggtgtgagcagcatgctggagtccgacgaggaaccagagtctccactcactcaccaaaccctaccacaactcctggcttcaccaaaccctaccacaactcctggctacgtgaagagggggccctgggaatttcacaggagagcaattcaaccatgtgatcaagttaacatccccagtaacatgacatcctgaaatcacgtgtttcctgatgccatgctccgagatggaggcaaattcctgaaaaaacacaacaccccagctcatgcctgtaatcccagcactttgggaggccgaggtgggtggatcacttgagctcaagagttcaagaccagcccgggcaacatggtgaaatcccatccctactaaaaatacaaaatttagccaggcacagtggagtgcacctgtagtcacagctacttgggaggctgaggcaggagaatcactcgaacccgggaggcagaggttgaattgagctgagatcgtaccacagcgagccgagatcacgccactgcactccagcctgggtgacagggcgagaccctgcctcaaaacaaacaaaaacacccaaatctaattgtgaggaaacatcagacaaaccctccgtgaggaaccttctgtaaaactactgtccttcactcttcaaaaatggtccaagggaagaaagacaaggaaacattacaggttaaaggggattaactggacgccaccagtaaaagtagtacctggtattggattggatcctggaccagaaacacacacacacacacacagctctaaaggaccttatggggcaactgagaccatctgactgcagacccatcacgatactgcagccatgttacacttccccctcttgattatttcctgtggttttgtaaggaatgttcctgctcttcggaaatgcatgctggggcacgtatggggtgaagggagtatcacatctggaactcactctcaaacaccatttgcctcatcctgtctccctctttttctgaatcatctgacagcaacttgtagataagagagaaagacaaagctaacaggacccaaggctggcagtgagtggatcctcaggggaggtgtatgggttctatctctgcacatttttttggtaagtgtgaaattatagcaaaattaaaagctaccaaaaaagatcccccttctttctaaaattaatactaaagggcctaaaacaaatgaacacagaagcacacctgggaagttgttattttatcggaactatgcaagggatatggaagcagcaagtgtgcaagaagagagagtctaaaacatggcacacccctcgcttctaaggggcttggcacaggtcaccaaaccctggaggactctctgtttacccaccaatgccactgatgagccactctgcaatacaacggcaccaagcagtattgtcttcctttatcctaatgctcaaaaaactgcatatattgctaaaggcaggactgcctttgcaagacaaagtttcagtccaagataccaaattgtgaatcacactcaatgcaccccagtttcactatcgcctgctgtgagctcaatcctgtgtcctacaaaggagaggtggtaactatcccccatacccaacacagatcctggcacatagagatcagtcaataatgtttaccaaaggaagggagggaggggagggatggaggaaagagggaaggacaagggaatgaggaggaagggagaaggggaggaagggagaagggaagaagaggggaaggagggaaggagtgagggagggaaggaaggagagagggaagaagggagggatggagggaggaagggagggaggaagagatggaagaagggagggagggagagaatggagggaggaaaggagggagggagagaaggaagaagggaaggaaggagagaacgaaagggagggagaaagagagggagggaaagaaggaaaaaagggagggaggaaaggagggagagagggaaggaagaagggagggacagagggaggaagggaaggagggagggagggagggagagaaagaagaagagggaggaagggagggagggagaaaaggaagaagggagggaggaaaaaatgagggagggaggatgggagaaaaaaaggaatgagggagggaaggaaggagagagggagggaagggaggaagggagggaagaagggagggagggaggaagggaggaggcaaggagtgagggagggagtgagggagggaaggaaggagagaggaagaaaggaaggcaggaaggagggagggagaagagagagacaacatccctgtctttcaggggagaaaagagacttgacagtttcctgccccagctggaaacagatggctcacttaaactggataatttgaagagcatgaatagaggaattgtttacagagttgtcacaggatacaggaatcaaaaagacagtgatgtttccacaggctggcaaaatctggaagcccacccttgtgagaagagagaaggtatgaagcggcatgggaggagagcaatgtggggcaggcgctgtgggtttggggaaagggatgaagcttccagcagggaggaaacagccaccaccctgcttccttccagccaggacccctggtgaggggatcatgctgagcccctacacagctgcaggcggaggactggtcgtgaaggaaaggtggaccttgtgattagaggtttggggcttggagccaggtgatatcagcctgacccccagggagggcgggggctggagctggagtttgatcacctggcaatgactcccatcaatcacacccatggaatgaagccccagtaagaactctggccaccgaggctcaaggagcttccttgccagtgatagatgggggtggtgccgtgtcctgaggatatggaaacttcacatttgggaccctccctcagacctggccttgtgtgtctcttgacttgtgtcctttatgacaaatctgtaataagtatagcactttgctgagttccctgagccattttagggaattttcaaacctgagggggttgtgggaattcctcaggtttgcacccagttgttcagaagcacaagtggcccgaaaccgctgcaatccctgaaaccacctccctggagcttgtaactggtgtctgcagtgtgggggcctcaggtggaccatgcccttaacctgcgaaacccgacccaatgctgaggaatgagtgtcacaattgcattgagagcaagttcaaagcgaaggtgacggtaagaacactcgataacattttagtgcttccaacatacggggtcctgaccccaggaactactcagccccacaaacagcctgtatggcagggcagcctcaatgtcctaattttacagatacagggcctgtggctgagagatatggacctgggacgggaggctgcacagaacgtctgcagagtgcacagaagaaacatcgggcagcctgcgcgcctcctgcacctgaggagctgcgagggcaatggaggcagcatgtgtgggatgagatggtcagatggtcagatcctggggtccaggtccagcccatgctgaggtctgaggggagtgggtggatgagcagaaagaacactcgggggccataggcaggtgaaatggttttattcagcagcagctctcattaacagctttctcacactggctctttacaccacctgcccagtctcggctgcttgagccggtggctcccacaagcagctgcatggccggctctcccctgccctcagggttagcagcttaactctttctctctctgggcacagcacaagctgtgccatgccatgccgtgccatgccaagctatgccctggctccccagatggacagctctggttctctctctctttctctgggtgccagtgcaccctccatgttaagccaagttgagccaagccaagccccgagagcccctgtacagcgttagcagggcaattataccttttgcagacaacagtggctcagagccatgtatgaacttaaacaaacaggttatataacacgtggaggtgtgcgcctgcgtgccgaactcactgagtcactctggccagacatgtgcctcgacctatccttaaccaaacacatccatgtatcttacagagaccagcgggaagagaattctgcacagggaacagcccaaaccagggcacaggggtgagaggggacacgggactgtggtgagacagacatggctggagcagcaggactcacgcctgggctggtggggcagtgttcacggcacagcatgcaaatagcacgtgcttgataactatgtaataaataggctaaaaactggaatagtagcttgcactaacaagataagacccaagggaagacacatcagatgatatggctgggctctgtgtctccacccaaatctcatcttgtattgtaatccccataatccccacgtgtccagggagggaccaggtgggaggtgattgcaccacggggcggtttccccgtgctgttctcgcgagagtgaggaagttctcacgagatctggtggttttataaggggctcttcccctttcacagctcactcttctctctcctgccaccctgtgagaaggtcaagcttgcttccccttcaccttccgccatggttgtaagtttcctgaggcctccccagccatgtggaactgtgagccaattcaacctctttcctttataaattacctggtcttgggtatgtcttcattgcagtgtgagaacggacgaacacactaggaatgcaggagctctttcctagtgcctgtggtcagaataccctttccgagtgtgccaggattcttctctctaagcagtgtagccactgacggtgaaaaccacccaagaagtaacaagcaccgtcttcaagtgtccgtacttgggatctgtggtgggttgaaggccggggctcagtaacacacatttaggcctttttccacagaacctaagaatgtcgccttatttggaaaagaagctttgcagatataattaaattagggatcttgagatgaggagagcatcctggattatgcaggtgggccccgaatccaatgactgctgtttttataaaagactcacagaggagcacacagatacacagaagaggagagggtaatgtgaccccgggggcagacactggagtgatgctgccaggagcccaggaatgcctacggttgggagagacaaggaagaggccctcccttgagctctgggagggagcacagccccgccgacaccatgatcccggccccaggacctcagacttccgatctccagaactgaagttttaggactctatatttatggtgatttcttactgatggacgttctaggaaggcatggagaagcggatcttcccggcagccaccagcgtgtgagcattttgcctcgggaaactagagggcagtagtcatgtgggttctcatgaacacgccagccctgctctctctcctagctctgggcccaaggccttggtatgtgcagctccctccaactgaggcacccttcccccaggggttccatggtcagctccttagccgactttatatatatggaggtctcaacataaagtttacacttgttcagcaccatgaagccgccagtccgacacccattcccagtacccttctctcacacccgcctccactagagaggctggaaaggagaaacgctcactgtcccaccctcccttgcagctacagttgtccatggggcatagatccacccaccagctcatgagaagtctgttaaagaagatttaggaagacttttctttccatttatttatttatttatgagatacagtccctctctgttgcccaggctggagtgcagtggcgcaatctcagctcactgcaacctctgcctcccaggttcaagcaattctcctacctcagcctcctgagtggctgggattacaggtgcccaccagtacgtctcttttagtagacacggggtttcaccatgttggccaggctggtctcaaactcctgacttcaggtgatctgcctgccttggcctcccaaagtgctgggatgacagacgtgagccaccacacaggccgggaaggcttctgcttttctgataggacagaaaagtagaaggggctagatggggctggtgccacgtttcctaccatgagcacagatgtggtgcctggagctacagcaaccattttgtgaccttgagggggcaaaaaaaataagagaccccggccctgatccaatgtcacagcttcccactttcagacttctgatcaagtgagaaatgaagtcccccttgtttacgccacctcactgtcagatgccgtcattcctcactgctctgtttcctcacccaagaggatgtccctaacatctctgacttgcgtctttccctccatcatctctaccacgtttctctgatcgatttcccttattgcacaaactaaaattatctcattattgactgtctgcctcctctacgccaccactgggatttaagccgcatgagaacaggaccttctcctagtcaccagcctatccccagtgcctagatgggtacctatgaacacgaacctccccaccccaaagatttgttcaagccagggttgctcagtctcaacactgtcgaaactgtgggctgcctcatctgttgcacagggctttcctgggcatggaaggatgttttgcagcaccgctggcttctaccaaccagaggccagcagcacgtccccacccccaccccagctgtgataaccaataacttctccagacattaccaatagtccctgggggcaaaatcatccggttgagaaccgctggtttaatgaatgggtttaatgattgcctgaaatggcctcctccaagtgcatgtggaaatgatacaatattgaaatatactggtagatgagaaagtcaggcaccaaaaacaaaattattttcatgccacttagaagaaaattatttattgtcacatgaatcacatgatgctatggtcagtgggccagcatatttgcgtacgtgttcctgggcataatttgagatgatatgatatggtttcagcatggaaaagggccacattcttacatttcccacctccagtggaagctgaaaactccacagactcgtgtcggttggacgactcggaatgtgcctccaagtctcatcaatgctcggagaattctaagataattcccttttaaaccctcaaatctctcactcaaaatgctctgctctaattctaaggaaatttccacagatggagacaaagataaatatgtgctcttggccaggtctgcatctcacaatacgactcattaaatcaattaaatcactcgcttggcagcattatttatggaaataagaaatcgttttccatcagcaagtttgagggtggctaaacaccgcttcacagcggtagggtggattgagctcaggctcacataattatgaaccaaaacttccatcttgtgaggcctcttttcactctcccaagtgcttccaaatccacttaggaccttgtgtctcccagaacagtatctccttttgcagaggggaacagcctcacagcatctctatgtgcagatgagaactggaagcagcacgtgggcaagttgccagctaagccagaaccagaactccagattttaacagcaaaacctccacggggggttgcagaggccagtctggcaggcagggaggtagcagctttggggaactgaagaaccactgctcccctctgcaagctgattgcagccgctcagaaacagaatgggtgtcgccggagcctctcatttcttttctcaagacaactgtcagaaattcagcttatgataggaaagttttgcactttgggttgttaacattagccaccaattcaaaattgaaaacacagcgtttacaggccttatcctagtatttagatccacacttcgtcaccttcacactttcctctgcccaaattccttcattcctcaggaagccacctcaagtcgtttccctctcagggattcgtgctgctcccaggaaacaaaggaagacccagagaaagaacagtctgtctcagaaaaagggcagagatttctcaaaggaagaactcccactcgaggatggaagaatcaccagtgcctgctcccgcccttcctgaaggaccaggacttgggctaagttgttagaacatccacacatcgctccccgtttaggttcctggtaaacagcaggagctgctcaggcagaggaggtgggtgcctcgccggacaactcaactcgcgggctggctcgtctgccaacctcatcctggatctgggactggccgtcagatttcccaggggctgccaccccatcaacctgttgccggcacaaagaggctaaaagcctatttggcaaaaccctaaacaaatggtcggtacccccaaaaccaaacctggagctgtagcgaaggaggctgaggcactgaagaaccttgtgatgcctcagctatgccagaatcaatccccatggcccaccagctactgacctccagaggctggggaagcgccacagcccagaggcccacggagctttgggaagaaggccaggtgggcgtgccacttgtgggtcaaggcctgccagaaatcctgcttcgagcctggatgaaaggccattgcagtagaactggaactgcattcatggaacctcagagggtttgggtctgtgttcctgcccaaatctgaggtcaaattgtattccccagtgttggaagtggggcctggtgggaggtgcctggatcatgggggtggatttcccttttggtgctcttcttatgatagtgagttactgtgagagctggttgtttaaaagtgtgtagcactgggccaggcacggtggcttacgcctataatcccagccctttggaaggccgaggcaggtggatcacctgaggtcaggagtttgagaccagcctggccaacacggtgaaaccccatctcttttaaaaatacaaaaaaaaaaaaaattagccaggtggcgtagcacgcacctgtaatcccagctactcaggaggctgaggcaggagaatcgcttgaacctgggagttggaggctgcagtgagccaagatcgtgccactgcactccagcctgggcgacagagtgagactctgtctaaaatttaaaaaataaaaaaaatgtgtgtggcgcctcctcctttcctccttcactttttctctaagtgtttggcgccttctccttcgcttctctctctcctgctccagccatgtaagacatgcctgcgtccccttcgccttccgccacgataaaaagtttcttaaggcctccccagccatgcgtcctgtacggctggtggaaccatgagccaattacgcctcttttctttaggaattacccagtctcaggtagttctttaccgcagtgtgagaatggactcacacagaaccagaggggatgaggacgtagttgtgcagagcagggctgcttcctgggggacagagcaggatggcagtgtggtgacacctgtgtgcacctgggcacctgggcagttctgcatagctgggcaagccagggacatagcggcatacaccaacacccctgtaccatccctaacgtgatcctttacccctcacgtgggttattttaaaattagggtgaaatgcacacagcctgaaattgaccatttttatacaatacagtggcatggagtggcttcacaatgttatgtgaccatcaccattgcctagttccaaaaccttcttatcaccccaagccgaaaccccatatccatgaccggccgctccccattccccacccccgcccctgcaccctccatcagcatgctttccgtctgtgtgggttcgcctgctcgggacgggtcgtatacgtgggatcctgtaacacgtggccttccgggtccggcctcttccacacagcgtgtccgcaaggttcatccgtgtggtggcgtgtgtcaggcttcattccttttcgcggctgaatcagattccatcgtgtggatggaacacattcacgtttcgtttatctgctcatctgtagaggggcgtgcagtgagctttttacagatgttcccacccattcgtgtcaaagagagcatccttgatccaaagacacaaactacaaaagggcacagccgggactaggaccccagttgtcccgaaggacctgttggccgccagatagtggttgaaggaagggacgcaagccctggttgacggagccgcggcctctgctgagacaggcgggtttgtccgcaggccttcgggaacgatgggtgtctcacgcttctacctaaggccaaccaccagtcagtcctccctctctcctcgtcctgctccacacagcgccccgtggagcaggcctccccacccagcacttgtcctcatttgtgtctgtgcccacaggctccaccgccccagctctgcctgatccaccacccgccagcctgctctgcacagaggcaaaatctgtccctgctgggttcctgcctccccttctccaacagagcccctgctcctgcaatgcccaggcctccttcctgtccccactcccttccgtccacccccatgcctccaggccgtccacccccatgcctccaggccgtccaccctaagctctgggtgtctaaagagaatcctaggtttcccccgaaactgctctctgagagccacaccaatcagatcggtttcagctttatacaaagaaagaatccacgtgactttgacacaattacagcactccgatataaagtctggaggttcatggtacagccagtgtattaaacagctgggtggtttcttatgaaactgctgtgcttatgacccagaaatcccactcgggtatttacccaaaacacatggaaacgcactgccatggtctgaatgtgggacccccggctagacctcgcatgctgcaattctaagcccctaaggtggtggcatcagcaggtggggagctgtaggacgccacgagagctagagtgtggggctctcacgatggcattagcgcgccataaggggctgaagagaccagagctcccgactgccaccgcgtgaggacacagccttgaagactccatctgtgaagcaggaggtggccctcatcaggcaccggacctgctgatgtcttgattctgggcttcccagccaccagcgctgtgagcaaccaatgcctgctatttatcagccaccccgttgatggggttttgccacagcagccttgatgaactgggacacacatgtgttcacacaaaaacctgtaggtgaatttttttaggggctttattcttaactgcccaaaattggaaaaaaaatccaaatgtccctcagtggaggatggattaaaaaaaaaaaaaaaaaaacgggggccaggcacggttgctcacgcctgtaacaccagcactttcggaggccaaggcgggcagatcacaaggtccagagatggagaccatcctggccaacatggtgaaaccccatctctactaaaaatacaaaaattagctgggtgtggtggtatgtgcctgtagtcccagctactcaggaggctgaggcaggagaatcgcttgaacccgggaggtggaggttgcagtgagccaagatcgagccactgaactccagcctgggtgacagagcgagagtctgtctcaaaaaaaaaaagaaaaaagaaaagaaaacacacacacagtggcacatccatacagtggaatattactcagccacaaaaaggagcaaaccaccacacagcccaaatcatggatgagtctcaaatgtaccatgagaagagacggttccagacccacaggcttcctgccgatcccacgcatgtggcctgcagggagaggcagaactccagcagggacaagtgaggggctgctggggtcagggtgaggggagggaaagcctgccaggggacaggagggaacccttaggggtgacgggaaaaagcctgtggcttagtcatgtgggttacacagctgcatgcatttgtcagcactcacagcagtgtgcacctagaaaggcacctgtgtaaaccctacctccacaaatgtgagtttcagaacatagtctagattaggggttttcaatcaggaggtgattgtggtgcccaggggacagcaggtgatgcctggagacatttttggttgttacgactagggtgggggtgctgttggcatctggtgggtagaggccagggacactgctcagccttctacgaggagcatggcagccccctacaaatgggccaagcatatgatgattatgtcaaccacaaaggtacacggagaggcactgggagtacacacaagtgacaagtcacgtgagcatgctgggatgatgagtgagcgtcttccattaaggttatctttagggccgggtgcagtggctcacagctgtaatcccagcactttagaaggccaaggcaggcagatcacctgaggtcaggagttcgagaccagcctggccaacatggcgaaaccccatctctactaaaaatacaaaaattagctcagggtggtggcgggcacttgtagtcccagctactcaggagactgaggcaggagaatcacttgaacctgggaggcagaggctgcagtgagccaagatcgcaacactgaactccaccctgggagacagagcggaacactgtctcaaaaaaaacaaacaaaaaaaagattacctttagcacaggtgttaactacgtgttaatacaaaaccagtctggggtggggtcaagcctttgtcaactgtccatcagggccccactaggcctgtgtgtttccctgagccaaaccggaccactgtggcaatttccaccactgtccccccaaaatcattctttatccagcattcagagcaatgttcattttaaagcataaaccagatcacattacacctcgttaccatttctccatcgcacccagatgaatccttgccttggcctgaaggccccgcagaaggcacccctcctccacctggctccctctcccctcctctctgcacccaccgtgctcagcacctaaacaggcaccttccttctttctctacccttcttcttggcagaacaaaggactgttctggattgcctgagggtgactggatggggaagagcccagttctttccttatcgaagtccctcccacaaacaaacctgggtgcagcctctatgaccctagacgactcttccctctgcctggattagagccagacacaggcctcctgagagcagagggcctggtgccacccacactctctaagaaggctgggggagcagcgaaaacgccaacaggaaacacgacaggagaacaagccctggcacacgtgttcagcggcaacatcgtccccaggagcccgaggctgacagaactgaagcatccgtcagcggataggtggacgagcggatcgtagtgctgctgcgccacggaatattccgcagccaccaaaggggcgaagtgcccgctcagggtacagcgtgggtgcaccttggaaacacgacacccagtcaaaggagccaggcacgaaggccacatgctgcaggattgcacttttttttttctttttgagacagagtctcactctgttgcccaggctggagcgcagtggcacgatctcggctcactgcagcctccacctcccaggttcaagcgactctcctgcctcagcctccagaatagttgggactacaggcacgcgccaccatgcccagctaatttttgtatttttagtagagacggggtttcaccatcttggccaggctggtctcgaactcctgacctcaggtgatccagccctcctcagcctcccaaggtgctgggattacaggcgtaagtcaccatccctggcctaggattgcatttctataaaatgtccagaatgtgcaggaaaatccacagaggcagaacgtagacccatagtcagcgggggcttggagtggggatgaggcgtgacggccagaggggacagggtttgctttggaagtgatgaaaatatcttggaactagacgctggtgatgtttgcacaacactgcgagtgcactaaaggctactgaactggatactttaaaatacttaattttatgttatatgaattttacttcaatataaataaaaaaagactaacctgatcatttcccaacaacaaccaaaaaaaagaagggttatagaatctagaagaatgataaattgtgcgtgcggacttttttaggtaatgcaaacgaatgaacacctgcctctcctatacaattaggaaaccctgcatttatcatcaggaaagctgggattccagttcgctggatttgactaattcccctttatccagtacagagcctggcataaccaaaagtcactggccccatgcatttgtgtctagagaaccatttgtccacggggcaggacataacccactactcattaattactaggaaacaacctcttttctcttggagaaaccattagtctcacaatcgcctttttaaacatccacgtttgcacaagaaagttaatccttggtgtcagaggtcaaggcggtgacttctctcactggggaggtgatggacggggcatgagagctcccaaggtcctgaggtgtcctgtctctgatggtgcgggtgcaggtgcgggcgcattcgcctggtgagaatctagcagctgagacggctgtgatgtgtacccttttctctatggatactgggcttaaaaaacaaacactctgtacaaaaatacttcaccctcccctcaaatccatgttttctgaaaaagtaacataagtggcttttaaatatgagaaagacaagccaaacttctctcaaacaaagaaataaaaaatataaagatgaatgtccctgtgttcacccaccgcgggaaggacctgtgactgtgaccacgcagagagtgtgttcgcccgccacgggaaggatccgtgagtgtgatcatgcaggcagtgtgttcacccaccgcgggaaggacccgtgagtgtgatcacgcagggagtgtgttcgcccgccgtgggaaggatccctgagtgtgatcatgcaggcagtgtgttcacccaccgtgggaaggatccctgagtgtgatcacgcaggcagtgtgttcacccaccgtgggaaggaccagcaagtgagaccatgcaggcaatatgctttgtatggaaacaggagctctcatgcattattggtgggagagaaaactagtccaacttctttggaaagttctcagtaaaaatctcccaaaactaaaaatgcacataccctgcgaccctacagattatcttccaggaacttttcctacagggattctaacatgagcatgaaatggcgttgaggatgacttggcttgtaagagtaaggttgagaaagctcctgtgtgccagtccatagtacacggtgccatgggtgcctttgaatggagggggccagagctgtgagcacacagatggtgtcatgttgttcagtgagaaaagcagggcagtgggcacagtcaaggagcacttgtgggttttggccatgtgggaacacacactcagatacacacatacacacgcaagcttggacatgcaaaggctctcgctcaaataacacaagacaccgacatcactgcctgcttctaggaccgcggctctcggggagaggcaattttgcccccacccactcatacacacaggaagcatttggcaatgtctgggggcatttcggttattgcaactggggagtggccagggctgttcccaccatctggtgggtaggggccagggacattgctgaacgtcctacagtgcatggaacagccccatgacaagggcagcccggccccgtggcagcgcgactgaggctgagaggccctgggctcagaggagatcggggtgggaggaggacagttcccgccacacttcatttcgtgctgtagggattttgttgtgtgatagattaacttttgaagtatgtttttaaatctgtctccatagctgaaccctggagaaatctcagcttatgcagaggaatactcatctctgtagcatctacagggcattctctgtgcaggctttcctgataattaataattggtatcaggacaccagaggtgagagagaaatctcaagccccaaagctgaatatttcaaaagaggaacaataattgcaagttctgtaaaagtagcttcccatacttatcaacttttattcacaaggactatgattagcagtggctcaagcctgtaaccctagtactttgggaggtcaaggtgggaggatcacttgaggtcaggagttcaagaacagcccaggcaatacagtgagaccctatctctaaaaaaaaataaaaaataaaaataaatgcatgtactttttacaaattttttgtaataaaatataacataagatgtaaaccattttaagtgaacactttagtaactttaagtatactcacaatccttgtatccatcacctgtttttagttccagaattttttatcactctaaacagaatctctatgctcattaagcaataactcccccttcctccctcccctattccctagtaacctctattctactttttgttgattttttttaaaaaaatcaatctcatatttcatgttaataagccaagtttaagcaacactttaagatgaactaaggtcgtgtaaattaattgccagccttggtaattaagatgcgataactctttatccatccctcacatgacaacctcacgcgagtatttctctttctttttctttttttgagatgagtctctctctgtagcccaggctggaatgcagcggcataatctcagctcactacaacctccaccttctgggttcaagtgattctcctgccgcagcctcccaagcagctgggattacaggggctcaccaccatgcccggctaatttttgtactaaaaatgtaggtacagggtatcaccatgctggccagactagtctcgaactcctgacctcaagtgatccacccgcctcagcctcccaaaatgctgggattacaggagtgagccaccgtgcccagccatgcaagtatttcttatgcatacatgtggcaaagacagatctcactatccctcgtaaatgtggggcccaacttccatagtgtggcattgctgctgggtggtggctcacccagggacaccctcccagcccttgtcccgtatcccggtgaggggatgtgacccaagccaagggatgcatctcctttcctagacagacagcctcgtccgccctcccttcccccactgccaagggatgcatctcctttcccagccagagagcctcgtctgctctcccttcccctactgccggctggatgctggggcctctggggccctggagcaccgccagccccaagatggaagaaacctgggttcctgagtgaccacgtggaggaagccactcactgaccattgcacctccctgcaagggggaaatgaacgggctgtgctgagcccccagagttcctggatttttgctgcagctgacattaacctgactaacaccagcgccgcttatggatgtgagcaactgaaattcaaatcatgcacggcgcaccaggggtgtttaataaaagttgtcactgctgaatgctaaaaagctaaattttaaaaaatagctgtatgctgtaaaacttgatcttccaaaaaattcaaaacatatcagacacggagtgcgtgcagtggtgggcagacgatcgatttccttgtgtcactttgtgacactgagctgtgagggacgggtccagtcactcaggcattaggaggcagcgcccaatctctgcttcccagacttctgctcctggtgataattgatgaagacgagactcattggccaaagccgtgctcacaagggaaggagccttccacaggagtctgaaatttctaataagattgttcacatccaagtatttctttcagatacgagtaccccgagctatgagcaaaacatttgtcccaaaaagatttttataagtaagtcatgtttctagaagctgatgggcttattttgttgtctaattatgtcggaggcgcactatgtctcattcttttatctttaaggtgaggtcgtagtagttgaatagtgccttccccaaaaaacccacatgaccccatttggaaacagggtctgtgcaggtataattaaggtaagggtagagatgagatccaggggggttggggtggaccctccatctgatgagagtgtccacataagaggtagaaaaggacacacacagacacgggaaagctcacacggatggcagtggaaccagaggtcggagtgatgtggccacaagcccaaggatgccaaggacagccggggaacgcagggagccaggctccccacagagcctccagggggaaggcagctctgcggacaccctgacctcaggcttccagcctccagagctgcgagaggatgcattcaggttgtaaaggcccccagctctgatcactggcaatgaatgaactaggaaataaattctctggtggtattgtcagaggcatgtgaaccagagcaactccatcttgaataggggctgggtaagatgaggctgagacctactgggctgcattcccagatggtgaaggcattctaagtcactggatgagataggaggtcgacaaaagacacaggtcataaagaccttgcggataaaacagttgcagtaaacaagccggccaaatcccaccaaaaccaagatgaccacaagagtgatctctggtcatcctcattgctacactcccaccagcactacgacaatttacaaacgccatggcaatgtcaggaagttaccctatatggtctagaaaggggaggtaagaataatccaccccttgtttagcatataattaagaaataaccataaaaataggcaaccagcagccctcggggttgtcctgcctatggaatagccattctttattcctttactttcctaataaatttgctttcaccttacagactcacgctgaattctttctgtagagaatcccctttccctctccaggactttttccagatccaggagagaatcaactaagagtctggcacctttataagtctgataagaaacatttacatctgttctctctgaagcctgctgtctggaggctgcatctgcatcataagaacctcggcctccacaaccccttatctgaacccagacacccctttctattgattccaggtcttcagatgaactcattcaaccaactgccaatcagaaaatttttaaatctacctatcacctggaagtccccatccctacccccacccacactttgagttgcaccaaatcaacgtacatcttaaatgcattggactgatgttccatgtctcccaaaaatgtataaaaccaagctgcgccccaaccaccttgggcacatgttctcaggacctcctgagggccgtgtcacaggccagggtcactcatatttggctcagaataaatctcttcaaatattttagagtttcactctttttgtcaaaggcgttcaaaccatagcgactccatcttgagtgagagctaggaaaaatgaggctggggcttgctgagctgcatttttaggaggtgaggtgtttccaggctgtagatgtttacggttaagataacagtttgataacatttactaaaaagacccagacttaggagtgtcctgatatcccgatatcttgagaacagaaacattcctaattttgctttaaagataataatatcgattcttgcaaaatgtagtaattaagaaaattaatcctttatcacaaacccttacagcagagcacatctccccatgatctttttttatcccatatatatacgagtattacccttagggtggacaccttccttctcttactttcgggactgccctgctccgtctatggagtagctcttctttcaccccttcacttcttcataaacttgctttcactctgcactgcagactcaccctgaattctttcttgcaggagatccaagaaccctctctgggggtctggattaggaccactttctagtaacatttttgtcaacatgagttcatcacccacatttaaaacttacaagataaatccagaaaccaaactttttggattctcttgaaaaataaggagctcctgcaaccttcctaaatggcagccaccctctcttatctcccccacaccggggacaatgtctgctgccttctctctctagccccactctgcttcattaataataatatggaattacagtaatgataggattaagaagaaagagcatttttacctctccgtctccagatggtggagatgttcctttgttttactacagtaacccctttatatacggatctcataacatcatgttgtatatcttaaatatacacaataaaagctattaaataaataataaaattgaaaaacagatgttaaaaatggaaccaggaaggctgcatgattccagaacaatcggagacagtatgtccctttggagaagtgaagaagacgactgggcaggcgccgttgccctatgatgtcatccgcctgaccctgtgagcatttggttcaaaatctctgcccctggaagactgagtggcccggcagccactgaaaagcctcatttccaaaaagcccaggcaggaagggagccgtgtggccgccgtggctcatggcaatgctggagtcactgggcctcgtgcttctgagcccttgaacggctcaggttaaagagatcccgcgactctttatgttctaaaagcagatcactccaaacagcccccttcccctcaggcctgggatgagattcacagatgccctgctctgtttacctatgacaaggccagacacagcccctccaaaatctcagcctttgccttctcagagatgagctgaactgcgtgtccgctggtggaccagaacaaaatgcgcatcagccaatctttctttaagctcctctccttcccctaggtccgcccaggcccgcccccaaagcatgagccccagaaggcccccagcatccccccggggagcagatgcaccccaaggcaggactttctcccatctgctgtccggtccttgccaccgtggccccagcgcctcacaccgcacaccgcccggcacctgctcttcctagctggttttctcctccctttaaagggaaaacccaggctgcctggccctggagactggcagtcacggccagagccctccccacattcccgttgccccttcctgccgccatagggatcagttacaataaaacccctccttctggagtccaggatttcttctgtggcctcatcatggagctatggtcactcaggaggacaatgggttaagaaacgcctctaccacgcttcactcccctctgcaaggtgcggcagcacagaccccgcgcccccaggctgtcagattgctcaaaccctccccaggaaagcgcagcagcactgagaagcgcggcccagacagaaacccgggcacctcgtcccctttgtcccacacgaggcattcttacacgggccaggcacaccggagtcacgttgtgctgctggccccagtggctgaaagtagaggctgataaatttaaatcactgctgagatgacagcccatcgctgtgccaggagaggagccaagtctgccaagatcaggacttgatggtgaagcaaacgctggcacagccgtgctggccccgggccacgcgcacatggccagggcgtttagcactcgggcctccgcaccagcaggagcgaggccgtgtcttccaactccctcgacaggcgtgaggggcacctgccagcgccgtcgggggcctggggcaccagatggctgcagggccggaggaggaaggggtgtggactggaaaaggtgtcgaggcgggaaggggacgctctgctgggaggaagaggccgctacgagcccagaaggcagcggggagagaacagcgcaaggcacaggcggctgtttgcaccaactcatttgccggcgtatacctcgcgctcgctgggaagcatttgcacaggctgcaaagcgcagcgattagagacccgcttccaaataaaatcaccgtggagagactacattttcttttcagctaatcctttcattatctcaccttgttaaagtgaaaatgtcattatagcttttttcaggtcagcgcccagatcctgctgctaaaacctcgtctagttcctgatactttatgaatcagagacccatccgccaaagccatgttcaaagggcaggatcgagagtggcaagtatcactggtcacatccaagcgcctctttcagatgtgagtatcgctgtctataagcagaatatttgtccccgaaagatgtataagtaaatcatgtttaagagatcagtggccctattgtattgcataactatttcagagatgcctcgcgttttaatccacctgtaagatgtggtataggaggttaaccagtcgcccacgccccccagcacatctgggtggtggtttctgcacgtttcactgtataattatttttataaactaaaggaaaactaaacaaagaagatgtgtgaaaggtggtctttgtgcctttgttctgcgtggttctgtgatgtgtattttcctagatgtttgtttctttgggtaaagcttctaggtgactgggcattgaacaaagtagatgaataaatacaagttgtactttcagaatggaaaatcatttaggcaatacagaaaggtaaggaagaaaatgcttaaaaattaagaaactcccatcatctgaagcatatagactttcagacatctttctacccatattcacatatggaagaatatatgggcttttactaagaaagtataataatggcttatttttaattcattgatttgcaaatgttcattgaacatagagtgtgctttgggcacgtgcctcaggaaatgagcttgcagcagcatgataaatgctggcaattacttcccaacatgtatccacagatgaattaaaatagtgctcaaagcaatctgcgattttagaaattattaccacgagagacagtgaaatgagcccaaagacctgacaatctcggccaacagctcagatcaactattgttaaaattcgtactgtgggaaagaggggcacatcacagaagtcaccagagagcttacaaaatgacacactcggtgaccaggctctgatgccattccaagcatggccccacagctcccggcccagcctgcactgttcatgctgcttggctttgtgaacagttgcgtggtggcttctcagcggccttggtggcatgggcaacacgtgcccagctctgcaccatgggcacccggcagaccctcctgctgtttctgaactcctcacctccagcctttctagcctcactagcctcccaagcttgctcccggtctcagggagccacaggaacactctagaacactctggaacactctggggccattggataacacatacgtttgcttaggtatcagatctaatgaaagagaaagagaagtaattgacattgagtgaacatacacaccactgtccctccgtgggggcggccatgtgaccaagagctcccccaagcatgagtcgtcttcacccctccatccgttaccccctgtcagttaccccgggtgacccttaggactctgagcacagccggcgggcattctcccagccctgcagcaggagggtgtgctggcctttcttggtgcccaagggcaggtgacaggtacaggcagggggacactaaaaccccacattctaaagaccccaaaacagaggccacatggcccccttggggctcatacagagacacagaaccacctccaccaccactgtctcctccggcccccaattccaactgctcagctgaaacgtttcgaaccaagtctaaactctgcaaaacgctggctgaaacgtgggcctcacgttgcctgaggcagcccaccccactcttgcccagcagaactggagcgaaggtcggtcgcaggcagcagagaactgcccagtgtgcgccgatatcctctgtcccttttcatttctgaaaagcgccggttacagcccacaaaattgatttcatggctccctaatgggctatgacctgcgcttacagaaacactgattgatacaccagataaatcctcgagaccaattttctcccacccacacccctccatgccaacacagctgcaccaaacatgaggggctcccgtgtcctgggccgggcacagtggctcacgcctgtaatcctgaggcgggtggatcatctgaggtcaggagttcgagcccagcctggccgatgtggcgaaaacccgtctctaccaaaaatacaaaaattagctgagtgtggtggtgcgtgcctgtaattccagctactggggaggctgaggcaggagaatcgcttgaacccgggaggcggaggttacagtgagccaagatcgctccatggcactccagcttgggcaacaagagtgaaattccatctcaaaaattaattaattaattaaataagtaacgacatccccttctctttcattagacctgacacataagcaaactgcaggcccgagaaaaaggatgatccaggatcagtagcagctcagctgggccccaggctgtctcccgtgcagtacgattctcccctggacgttagaataggtggaggagctgcctctgatcccaaggcttagctggggagggggacgggcccatcaacacttcgagactgcaccccaagtgctgatggacacagagatacacagaaccagtggagccaatcactgtaaaccctgcccgcgagtggaggacccagtagagaggctgtgttcattttctatgcatcgtaccaaatgatcacagatggcggcttaaacagccccatgtgttagctcatagctctgtgggtcaggcgtctgggcaggctcagccaggcgctctgctcacagtcttgtgaggccaaattcaagatgctggccaggcaggctcttgtctgcaggctcaggagtaaggggagaacctactctcagtgcactcaggctgtgggagttaagcgcctcgcaattgcagagctgaggccccgtgtcccgctggtgctgccagggcctctcagcaactggcagtgccttcgggtcctcacttctgtcttcaaagtcagcaagggcgggtcaagtcctcctcctgcctctgctccctctacctctcccttctgccacctgacagagaaagctctcggcttgtgcaggctccagggattaggctgggttctcccaggcggcctccctttctcagggcccaccatgccctgggggtggggatcatggacacagagagagacatcgtcccatccacaggctccagagattggggcagggaatcttgctgggcactgctaggggtctgcccgccacagaaactggtgctctttcctgctgcccgagaacctgagagaatgaggctctaacagcttgaacagcggttttgccaccatgaggcaaggacccatttcagaatgcagaaagaagaagaaacacagactctttggcaacatgatttgagccctgaattgagccacacctgatgtctgcggtatcctagatttttcacttactctggcccatgcatccccttttggctaattccagtgggagagggattttctgttgcttgcaaccaatggtcctgattgcaataactgtactattttagcataatctttagggctagcagtgagtccaccaactgtagcaggccacgcacttccactggaagctccaaacaccgaggaaaatgacaaaaggtctgagatttttctcggggtggaatatgatttcacacatcaggagcttgaagcctgggactcaaatatcacttctgaggtgcagagagaacccaatagccctcaggaaagcctggtgagggacatcttcctctcgctccccagtgagatgccctgtaattcacaccagcccacagggaagcctggtgagggacgtcttcctctccctccccagtgagatgccctgtaattcacaagggcccacagaaaagaatgttaaacagcgtgtttcttgttgggggaggagggagaggagcaaatgggtttctctttcctcagaggtcagttcctcaaaggagctgccagccccgactcaacagggcgggatgagatgtaaagggagaaatctcaaacgcctccaggaccaggggctcaagcctctccagtgcccttgttttcctacagtaactccacaccagacctaaaggaagcctgtgactcctaacacctgcaacgctgaccacagcaacggcttcctgggagtcagtgaaggcccagcggaaccaacccgaggaatgtgtgctcacaaagaggccaggaacaggcaggtggctgtagccccttctacccaggaatgcccctttcacttaagaagtaggtacacaggctgcgtgtggtggctcacacctgtcctcacagcactttgggaggctgaggtaggcagatcacttgagcccaaaagtttgagaccagcctgggcaacacagtgaggccccatctctccaaaaaaaatacaaaaattagccggatgtgatggcccacactggaatcccagctacttgggaggctcagatgggaagatcacctgatcccaggaggtgaaggctgcagtgagcacagatggccccactgcactccagcctggacaaaagagcaagatcctgtctcaaaacaaagaagaagcgggtaccacagggagccccacccagctcttgggggagaaaaacagcccagaagggaaggagctcatgcagacggtgcagcacatggtaggggtgccagcacccccagttcagatgatgtgcaaaattataatcttcaagtagaaattagcaggagaatagaggcttcctgagggtgtggactgtgctttccttgtggaggccctgggtggttagagcgggtctggaacatggcagggggacgggtttctagaacgaggagaagcggatacagtctaagatgtggtctgcgggtgctgcgaggggtctaaggaaaactgccctggatgctgccacgatgaaaaaggagatcttatttgttgtaatcacaggactagaaagggaattggagagggcgtctgcagagctggtgtgcagctgaacttgctgggaagggatgaactcactacactgggagatgagaggcctgggtttgactcctgcctctggaatgatacctcagcattctcgggacagaagtgggacagaaggagagtccccctgagatggcaccttcacctgcacgtggggggccccccagggccttgtggtcagggcgggtctgctgcagaagcctcttcatgcctcattgattccatcctctcccctaccccttccctctcctcccactgcttgtttataacaaagcatcttaattgcctggtttgagcaaccaagaatgaagaatgatttgacgagtcttttgttctcctttttagttattaaattttaattaaaaaccattaaaggcacccttccccaattcacaataataaatctcaccgagaccctcacggtctccctccagccaagactgaggcagcctcctcccctctttcctgactcctagaccaccccaaaccctctttccccaggaatgccaaaggtgcattcttaaaaagagttatccaagctgcaggtcctgctgcattggattgtggaatcaatttagcaaggcatagcatgatctttaaaaactaaacatggaatgggatggggtgcagtggaataggtggaatggggtagaatagaatagaatagagacatggaatgggtggaatggaatcaaatagaatggaaaagtgggatgggatgggtggaatgggatgggatgggatgggatgggatagggtagggtagggtagggtagggtagggtagggtagggtaggataggatagggtagggtaggatagggtagagagatgggattgaacggctggaatgggatggaaacaaacaggtgagagttagggaatagaatggcaaacacatttataagtgaggaacttgcatcagctccattttacagacaagaaaactgagagtgaagattgctccatgaccaagtacctaagacacgatttgaacacagaagtttctcccatggccctccagctgcccccatactcctatgggagcatttcttaggaaacactcgtctgtctccccaccgtgtccatgaggtccctgtgatatgactccgtgctccatgccatggtcatgtaatgattcaattgattgaaagaaagaatgaatgaatgaatgaaatgtgaagaaaaggcacagggccatctctcactccattcttagagataatttaggcaattggggaaagtctgggtatacacacacttgcagacaatcccatgctatcctaacgatgcctgtgatggggggtcgccttgaggattgttagggcaagcacaaaagggatggctacttctcagactgcttccattaagaactggtgacccccaaagccagtgatgcccagcaattgtgtgcagaatccacttctatgcccaccgtgagaaaggctctcaggccagaaagtaaatgtccactgggagaggagagcaggtgctttgaagatcaccagggcctaccccatatgcattttggccttctcctttctaacagaacccaagtctctggaggtggtcatggaaatagctaaatagctacatttcccagattctggtgcagactagggtggcacatgacagctccaaccagtgagtgtaagcagaagtcactgaaaggcgtcgttcccaagaaggccctttaattgcggatgattcagctgtcacttactttctcttgcccctcgtccattaccgctcccttgcttcctgcctggaatgcaggtgtgctggctggagctccaccagctgtcttgagagtattaagacaggattgttgtcatcaagatggcagagcagcaagccagagggagcccaggtccctaaggatgcagtggagcctgcacaccaggaagctctgggattcctgcatccgaacttccatgccataagaatataaacccttctcttgtttgaggcactgcgtaactgagcataattctgaatgagatgtccaggacatttatcccaagcatgtggaccagaagggggtggtgaatgccagctgtgtgcaggccccacccctgccaagaggctgcacaaaccagaactctcaagcaaaaccctccttggaggaggagtcactgcaaggccactgccctcaaccaggggaacgagccataaaccttgacttgaacatcaactcagcactttgcccttcattcagtcagtcaccagtagtcatggcctctagttctctccctacctaggaggcagaaaaatcatctgaaagtggatattcaaccatgtcattctacataaaggaccttagaggctacccatgaccttcaggacaaagtccagagtcctcactgctgctcgtgatctcaccctgtctcatcgccaacctcactgtgtgcttctctccttcccaccacgctccagcatgctggcctctctacgctcctgcccaaggccttctcgggactgctccccttcctggaaagctcctttccacggccctcccgtagagaattccgctcatccttcttctctgcatggatggtgcttccctggactggcttagtccccactgcggcaactttccttgcagttgtcattgcttgccacacaggaggtagcagacactgacaaaagtgattacaaagatgatagggtgggctggctgctcaggacagccctggagagggcacacaaagaaagggaagaagccacattggacacgcggacagccatgttcttagcccttgttcttaacacagggcctagcacgtagtacgtgatcagcaaacactaaccaaatgggtacacaaacagaacccagtgcctgagctgtaaagtttattccaggccagactgaggataagcgagatcccacaacagatcagtttcccgtcagtgtcgctcccattatgaacgcaaatgtccagtcgtgaacacaatatctgcccttccactaggctctggagcacctgttcactacagaaatagggagcatttcatctccacttagttgtctgaggttttcttttttataatccaagtgccaccaggtcaggcccacatgctacatcctgcctggagccttccctggtcatgacaagaccgcagggcccctcttcttctgagcctgagttcctgttcactctgttagcttccagctgcatcagctcccacgcgagccaggaggaccacgtggcctcagtctcccatctcaccaaacccacactcagacttcaacttgatctccaaataagtgacacactgtctcagagctacgttgacaggatggaaaggtgctgctctccacacaaccttgttaaacactcgacatttaaataaactattgaaggccaggcatgccggctcccacctgcaatcccaccactcttggaggccaaagtgggaggttcgctcgagtccaggagttgaagaccaacctgggagggagggtggtacatggtgagagtggggagtccaggcaggaacctcattccaagcgggcaggaaaaccactggaaggttttaagcaacagagtgaggtgacctagtttgtttcaaaaagatcaacccctgtttctgagtggcaaccgaccattgatcaataagactagaggccaggggacgaggcagaggctaggatggctgtctaggtgaagggcaggctggtctggactaaggagctagcaggggaggtgggaagaagaggttaggtatgttgaaagtttagagacgtccagatgtgctatggtttggatatgggcttgaagaggagtcatggttgatcccaaggctttatactgcagcaactagatgaaatacgttgccatttacaaaaatgaagacccctggaggaggagtacatttatgggagtaagaaattgcaagtatatgattttggacagatgcatttcagatgtgcattgggtcaccaaggggagatgctacatgggcaactgatcacctactaaattccaggagctgcagaaggtaccaacgatgcatggacacaaccctgccctccatgctcacgtcccagccagcaggctgacgtgtccacaaggacaggcacatgataagggctttaacatgggtacacgcaaaaccttactgggagtgcagaagacgcctgcacaatgcagctgcctggggagggcagagacagacccagctcctgaaaggaagaggccgctgatgggagtctgggggatgtgtgtggtgatctggtttttctatacatcagtcattcagaggctaccttcaaatgtgtcatctgcatccctcaagtttgatctaataattttctttaaattactgacattaaacctgagtaaggtttaaatttatagatcaccaccacaaaatgaaagccaacatcatcagccttaaatgtaaagtaacaattaatataggttgttttaaaaagcagaaggatatgaatttctagctagatagctgagctgactcagcattttgagccagaggttcacaaagcgatcactgtgaacattgatcatttaacaaatgaggtttaacaaaggtgattagcaagaattagaaatatcaagtccaactaacaccaaactgagactttctccttgatttaatcagaaggagtaaggggaattaaaaggaaataagtgtgctattctgtaatgccatgttgttcagcaatgtttgagaagccgcttaaacctctctttggagtctcagtttgggaagcactgtatctggtcagagaaaaggcagcattcagggcagtggcaacagcttctgcaaaagcacagaggcaggaagcagccgagcatgttttgaaagctacaaatcatctcacgtggctaaagggagaggtgaacgggggctgtaaggtgggcaggagtcagattgggaagtgcctcgcctgccaggctgaaaacaggggattttattttgcagacaatgaataagtgcctccgaagggtgtcaaacaagatgatgggatcaggttcatatttataatgaacacacaggatggaatgaatgaagactgccagactggaggtacctcaggagacacaataccggacgaaagccatcctgaactaagaccacagaaataatagagaattccagacccaagaagtattaatgtggccaggtgcagaggctcatgcctgtaatcccagtgctctgggaggtgaaggcgggagaactggttgaggccaggagctcaggaccagcctgagtaacatagcaagacccctctctacaaaatatctctacaaaatagccgggtatggtggtggacgcctgtggtcccagctactcgggaggctgaggcgagaggattgcttgagcccaggagttcaaggctgcagtgggctatgattgcaccactgttctccagcctgggtgcagagggagacctggcctctttaaaaaaatcataataattgtggtagaattggcaggccttggcaactgattggagatagaagttcagggaggaatattctgcaattgtccttgtccttcctaaattggatgtggtgccatcaaccttcatcaagaacacagaagggaaattagccaggcacagtggtgcccacctgtggtcccagctactccagaggctgaggctggaggatcgcctgagtccaggaagtcaaggcagcaatgagctatgattgcactgctgcactccagcctgggccacaaagcaagaccccatctctttaaaaaaacaaaaataaaagtggaaagaagggcgagtgttggtgaagagacagtgagctccatttgggatgcactgaacttgcaggaaatgcaagaatcaagaaaagttgtctaggaagcagctggaaccatgtttaatatttagggggacatttggggcagggatttgagccgtcttcaacagctaacttgcggtcacgggcgtggagagggacagcctggagaagaggagaaagttgagagctgtgctgtgaggcccttcttcataggaggggccatgaaggagacagagaaggacagggaaggtgggaggggaaccaggaggcagcagagtaacagaccccagagataaagactttcaagggagaaggcgtgggccacagagccagagggggtgcaaccgtgacttagtgaagccccttcctttgggtctcgttacagccacagaacccgcctccatctgactcaaacactgtccttaacttgctcacttcagaaggccgtccgtccctgctaccgctcctaatgtcctggtctctgcctctcctcctgctccttcacatgacctgtcaggaagggacaagcatgactcagccccacaaaattccagtgtgtgcagtttacaaaagatgctagaaatacaagttttagactggacgcagtggctcacacctgtaatcccagcactttgggaggctgaggtgggtggatctcttgaggtcagcagttcaagaccagcctggccaatatggtgaaacaccatctctactaaaaatacaaaaattcctaaaaccataaaaatcctagaagaaaacctaggcaataccattcaggacataggcatgggcaaggacttcatgtctaaaacaccaaaagcaatggcaacaaaagccaaaattgacaaatgggatctaattaaactaaagagcttctgcacagcaaaagaaactaccatcagagtgaacaggcaacctatagaatgggagaaaatttttgcaacctactcatctgacaaagggctaatatccagaatctacaaagaactcaaacaaatttacaagaaaaaaacaaacaaccccatcaaaaagtgggtgaaggacatgaacagacacttctcaaaagaagacatttatgcagccaaaaaacacatgaaaaaatgctcatcatcactggccatcagagaaatgcaaatcaaaaccacaatgagataccatctcacaccagttagaatggtgatcattaaaaagtcaggaaataggtgctggagaggatgtggagaaataggaacacttttacactgttggtgggattgtaaactagttcaaccattgtggaagtcagtgtggcaattcctcagggatctagaactagaaataccatttgacccatccatcccattactggttatatacccaaaggattataaatcatgctgctataaagacacatgcacacgtatgtctattgcggcactattcacaatagcaaagacttggaaccaacccaaatgtccaacaacaatagactggattaagaaaatgtggcacgtatataccatggaatactatgcagccataaaaaatgatgagttcatgtcctttgtagggacatggatgaaactggaaaccatcattctcagcaaactattgcaaggacaaaaaaccaaacgccgcatgttctcactcataggtgggaactgaacaatgagaacacatggacacaggaaggggaacatcacacaccggggactgttgtggggtggggggaggggggagggatagcgttaggagatatacctaatgctaaatgacgagttaatgggtgcagcacaccaacacgacacatgtatacatatgtaacaaacctgcacattgtgcacatgtaccctaaaacttaaagtataataataataaaattttaaaaaatacaaaaattagtcagccatggtggcaggtgcctgtaatcccagctactcgggaggctgaggcaggagaatcacttgaactgggaggcagaagttgcagtgagccgagatcatgcctctgcactccagcctgggtgatggtgtgagactctgtcttaaaaaaaaaaaaaaaaaaaaaaaaagaaatacaggttttatattaaaatatcccaatttttaaaatgctagcaaccaattttaaccattttttccctaattctacgtaggccaaatagaaagcgtgtgtgggtggctctcagcccacagatgcccatctgctacccctaaggggcagccatgttccctccccagccacccaactgaggaaaatgcttcctgaactcttactagccagaaaacatttgatggtcttccagttggtgtggtttttagtttattttctctcaatctctaattggcaggccatttctacaaagacccacacagccccaggcccgcaacagccaaggtccttttctcccttcacccattccccggaaagatgcctggagttgaggaatctctaagacaccagccacaccccgcaagggtctgcaagacggtcaaccacggcagtggactgaggaatgtcccccgagaatcacgttcactcgagacctcagaatgggacctcacttggaagtagggtttttgaagatgcaattcttaaggtaggaattcagatgggatcatgctgggtcaggggccctcaatccaacgagaatgtccttctggagatggagaaggccacatagagccgcaggagaaggccatgtggagacagaggcagaggtgggggcagggggctggccacagccaaggaacacctggagccactggaaactggaagaggcaggaaagatcccaccctggagcacagccctgccagcgcctggatctcagactttcgcgttcagaactgggagggaagagatttctgttgttttaagccccctagttcattctaagttattatgacagctgcaggaaactgatccaaccacccaacaaattccaaacgttccatcacacaacaagcaccttgtgagcacctcctgtgcacaccttgtgagcgcccactgcatacactttgtgaatgcccacagtgcacactttgtgagcacccactgtgtactctttgtaagcaccactgtgtacaagcacttcctgtactgagcatggtgtgtgtgccacatgtaacatggccctgccttttagcaagtagttttctaggacagacaagaagagtgcacaggtctctagaacacaggtaaacactgagaagggctaaaacacaaatacaaggtttccgtgtgatttcgaaggatgggcaggatgtcattgcagttggaggccactgggttcagctgtagacagggagccactctgagccatgcccacggggtaagaagggaagcagcagagccccccagcaggtgggagctgagccggggccctcacgctgtaagcccccctaacacagcggggtggacagctttgccaagctgcctgggaaggccttggagtgttctataaatacagaaccagcaggtgttgtggttggaagacataaaagctacgtggcactttctgccttacactcagcttacatcacacgtggaactgcttgtattggagtttacaacccctgaagacacaagggttccaaagaatgccgacagccagtaggtcccatatcacactcaggggcggagagcagcccaggggagccgggcacaggaaaccttcacagtcaggcccgcgtctgaacatggggtgaaaagtaccttgctgggcacgttgtaggggaaggtgtctgagcaaggaaggcgtgagactgtgagaccgactgtagcacctgatgctgacttgagccccctcaaagccatgggacacaaatcgctcctgcttgacagtgtgggaagctgcaaaattcattgtttttcttcaagatctttgggccaaataatagcacgtctttaaataacgcatccttcaactcagtgggcaaaacaagttatacctgacaacctgccttaaaaccaaggagccgggatcagggttgccatggcccaccccttcccataatgcttccttcaccccgctggaggtacatgcagcccacacacgtatgttctagaaggaacagatgctctagggaagggactgcaggcacaaggcccaccaaaacataatgcggcacgaaagaggcccccatgtggatgttgctccctgtggccagccaatttcagtcaataatccagtacgaggatgagcccagcccacaagacacatactcttcctaactaaacaacaagggtcccagctgtttgcattacagtgggggaggaaaatctaagcttctctctagctgaacccttagcaatgattttgggtaaatttccaaattgcctccaccaccaagagcaatgaaataaccacatgtgggaccgggcacagtggctcatgcctgtaatcccagcactttgggaggcccaggtgggtggatcacctgaggtcgggagttcgagaccagcccgatcaatatggagaaaccccatctttactaaaaatacaaaattaactgagtgtgttggcacatgcccgtaatcccagctacttgggaggctgaagcagaagaatcacttgaaccctggaggcagaggttgcagtgagctgagatcatgccactgcactccagcctgggcaacagagcaagactctgtctcaaaaaaaaaataaaaaaataaaaaacaagaaagaaggaaggaaggaaggaaggaaggaaggaaggaaggaagaagggagggaggaaggaaggaaggaaccacatgtaagatgaaggagaagaaaataggaatggtgtgtgtgagagcaagacaggctgtgtgcaagcccttcctgttttgttagtattaatttcttttagtaagaaccatggccgggcggtgaggacagaggccctggaatcagatgatcctgatcggaatcttgggccccttccccaaacccagttacaaattgtgcacctttggacaagttgcttaatttcttggggccgctcttttctcatccataaaactggaattaatcatagggctgtatggaaattccatgaaatcaaccatcccgggtgctcagccgggacctgcctcaacaggggttgagagcatctacttctttcctcctgggctgagacaatgagactgtgatttccagcaatttattcatttcagaaaaatgctgctgctactcagatgcccggagaagttcattagaacaggattttcctgtaatgcctccaggtcaccaggtcactgcagcaggccaggggtgggattctttgcctggcagttggagataattgcagttgccaaagtggtccggcctcctagcatgggggcagccaattaaccaggagagtcaccctcctggttgacagatgacgcctggtgttggccttgtgcaccccgattaacctccaggcgggctccccctccgccctggacattttcagtttcctgcacttattatgaagcctgcccaagaatccctaattcactaataagaaaatcaccatctaacatcagtgtttgaaaatgaccttgtgttagaactgtggtgggaagagtgctgtattctcaaacgatcactgttttttaaaagcgtggcacgggcactccctcggccacccgcctgccctccccaatccctcacccactgctgcgaccacccggtgctcagctcagggctgagccgcagtctgagggccgggccctggcatgggctccatcagatcccgtaatcggatccgggcgctttagccctcacgtgactaggggccaccgcctaaccctgattagcgctctacatcacccaccgctcagcctcccctggggtcgggtggcttctccacgtcttaaataagattcagttgtcatgtgtagtatattgggagtgcgtttgaaacggtgtttcctaggggagaagaaaggaaaacagcacccacaattgaacagcttaggaaatacagagagagagagagagatcgatctagaagcacggagggaaccctgagcctgagcctgaacgcagcgcagaggtctggggcccgaccaccctgggaggcagtgccccagctgtgctcaccggtgaggggaacacaccaccttcctgctactttagggacatcagcaaagtctcccttaaatatctccctttctgtaccaagaaagctataaatcggagccccatccttccagatgaagcagcattttaaaacctcagtttcatctggaaagcagctggggaagcaccccatggccaggtcgacttccctccaggcaccagaacacaggcagggaggacagaggaagtgcaggaggagggacgaggaccgaggaggcagagggagggtgctctgtgggccctggcaactcaacccgcgtcccaaagcagctctcattagggctgggctcctgacgtcttgtttaaaaaataaacaaaaagccaggggtggtggttcatgcctgtaatcccagcactttgggaggccaaagcaggtggatcacctgaggtcaggagtttgagaccaactggccaaattggcgaaaccctgtctccactaaaaatacaaaaattagccaggcatggtggcgggcacctgtaatcccagctactttggaggctgaggcaggagaatcacttgaacccgggaggcagaggttgcagtgagccaagatcatgccactgcactccagcctgggcaacagagccagactccatctcaataataataataataataaacaaaagtaaatggcttctaaagggaagtttttaaatctcaaattaattagatggcactccgcattttctaacccactttccaaaggtgttccctccgtggactcataacccctcgccctgccaccaccgcctccacaggtctgtttcccaaagcgtagactgccagccagagagcacctgcaagacgggccgaggctccggggctccaccaccagggtcaccggttcaggtcctggcatcgctgctctctagctatgtgatcttgggctagctgcttcacctgtctgtgcgtccaagtccctgtctccacgatggtggggacagtgataccctcctgtgctcgtttcctgggctgccatgacaaatgacaaaaaactgggaggctcaaaacaacacacatctcttctctcatagatctagaggccagaagcccagaagccggggtggcaagaccagctccctccaaagctgcgtgaggatccctgcctctgccagcaccggctgcctctgggggctcctctccgtggccacattgctctggttccgccttcagagtcacacggatgtgcctgaaactgagtttttcacaaatcaatgacactggaggatgcatgagttaggaagaagatgcctgcacacccgaagcccaggagaaccaatgagatgttaatattcccactggtgaaaagcagagaccaagactagacaggctcatgaagccgcccggagcctcccggccagtcaccacgcaacaaagaccggggccctggctgccgcaccaccgccctgtgcttcctaacgcatctttcacctctggggaaaaggaggttcagtttccccatttgtcatgtccgtgactgtgggccacagaagcctcctgggggagaggctggcagggaagggacgcagctgtcccaggcccacacaggagcccacgtggttccctgtaaaacgctcttcctgaccagctcctcactaacgaacaactcagcacaggcgtttgctgtgtttctctgcggttctcacgcctctcctgctgcacaccgctttcctgctctttctctccttctgtgacgctggagcacactgggtatggcaggagtgaactgctgcagggccacaggcgcccagcctgcaaaaacgtcccaacacagacagggcaggcccagtgccccaaggcaaacgcccaccaatggggtggccaggtgtggctgggaccaacggaggcagaagccgttctcttcccagcctacccatccctgcaaggtcacaaaaatgctgatggttacttcgtgcaaaagtgtctccctcctaccgtgaccggctcacttcgcacacactttagacagctctgctcatgagaaaggaaaaataaatacactgcggaagcatctacaagaaatctgggctgcacaagcttcagaggacccgtttctgggactatctgtattattctactaattccattcacatgctaatgattggtctgtttggagtttaataataatagcaggaatcgtaatagctaatgtttgttgaaccctcacactattccaggccctgttctaaatgctctgtgccattgaagtcatttaatcatcaaagcaccccttctgccgtccccatctgaatggaaataaaggcaattgctaatctttattgagtgttgcaagatactaagcacttttccccagtgaatgccttcaataacaatccgtcgaggagaagacggatgctattgttacctgcattttatggataagacaacgaaagcgcagagaggttcagaagagagcctgtggtcacacagccggaagtagcagagcagagatcggggcctgccagcctggctccagactctgccctgtgactgtggctaattccaccagtgaaggctgcttccgagggacacgttcacggagcagctccccgcacagatgctgtggggcacaggcaggtccgcgctccccatggcagcatggcgtagtggccaggggcaggcgctctggcgaaagtgcccagtgaatcttggctgctccactcaggagccataaggatttgggcaagtgacttaacctttctgggtgttggtgccttttgacagttaaatgagctagctggtgggaagagtgcagaacaggcctggggtacggtgaggattcaatgaggccggctcttgttttcatggctcatgctattgctctccaaacagacttatcaccaaaattatcatgcagtgattcggcagccgccagtggtcccaaatgccgcaggctcattctgcagattgatggagaatgggcatttcccacaagctccgccaggtctagcttgtgcctctgctgagagacccaccttcccagccctaccccatggaagagagaaaaatcctaaattaacaatgtgaaatcctgaaatgaccaagaaaacatcaagtaactgaacgtgtcctcaagcgacaagattctctttcctgttcttgagcagggcccgggcgtgagagctgaagcaggccggggtatacacaggacagtggcccaggggacacccaggcctgagagcaggaagagcggtggggtcacagaacaacccggaaagacgcagacacactcagaacttccaactgccagtcgtatccagctgcagatgctggcataggtacgcagaggattcgtgccctcacagaatggaacggtgcccacctgaagggaggcaactgggaggagcagggaacaaggtcccccccacgcccaggagtcctcccatggggagggagggaggcacatcaagaaacagaacaggtgataggacaggaggtccagatggctgctgtcatggcaggcagtcagggaaggcttctcagaggcggtgacctttgagcagagccctgaacaacatgatgagtgagtagctgggagaagagccttccagacaaagacatgaaggaggaagagctggcaggcctgtggccatcaggaggcccttgcgcttgctctaagtgagaataaatgcaatcagaagcttccaagagtgggcgtggactgagccgtttccaacaggagccctctggctgctgtgtgagagtgacttgcaggcagaggtggacacaggaggcctgggggcgctgaggcagtgtggcccagggacaagaccaggggtctctggccaaggggaccgaggcggcccgagcaagaagagctcagaatcaggatgtgaagggaaagtggcggatattagtggatcacatgtaggcaacagctagatagaggctgggaagaggacatgtttggcaaagcaaatgcttagccaagaaatggggggattgagagagagggagagagagagagactatacgcattacacatgactatatttgcaataatctcaggccttttagaaagtactgatgcctgtgggtaaacatgtggtccagccacacagtggaatattattcagccataaaaagagatgacgctctgacacacaccacaacacgggtgaaccttgaggatgctgtgctgagggaaagaagccggccacagaggaccatgtgtagtatgattctgttcacgtaagatgtccacggcgggacatctatagagacagcagattcgcagttgccagggctgggaggagaggagagaggagactggttgcttaatggcaatttctttttgaggtgatgaaaatgttctaacattgatgacagtgatggttgcacaactctgaatatactgacaacccctgacttgtactttagatggatgaattggatggtaggtaagttatatctcagtaaagcagtcttaaagctgggcatggtggctcgtgcctataatctcagcacttcaggaggctgaggcaggaggatcgcttgagtccaggagtttgagaccagcctgggcaacatagcaagaccctgtctctacaaaatataaaaaattagccaggcatggtgacacgcgcctgcagtcccagatacaaaggatgctgaggtgggaggatcacctcagcctgtaggtcgaggctgcagtgaaccgggattatgccactgcactccagcctgggcgacacagtgagaccctgtctcaaaaaaacaaattagtgaaataaagctgctttgaaaatactgttatacctgcgccccagctcactgcaccttctctaagaggctcgcgtgggccctggacacaggcgtgtttcagagctccctgggactgcatctgacccagaaccggctccgccccagcttctctgggatctcacaggtcctgcagcgctgtagtcccaacccagcttcgcggtcaggcagcccgggtttgaaactgggcccatctctccccagctgtgtgatcttcagagagcccctccatctctcaaagactattgtctcatctgtaaaatgggtctacatgagcaacagggcctgccgcagaagggctgtgtcatgcatgtaaccgaggaaggcacccagcaacgtgccggcaacagcagtccgatgcattgctgcatttgagctggaaaagctgtttacacaacttcccatctttaattctcacgatccagaagccacgatgcaggaggcagtcaccagggctggtgggcttggggacaagcaggaaggaagctggggaactgtctggacagaggcatggccctcccggggccccaactgccattcgctgcatccacccttcccacagagacaattattgagccccagccaggtctcagccactcgctgggcactggggactcagccacaggctgaagacgcagaacccacaccacagctggggctggggcaggtctctgggcgtgacgcccgacagcagagctctggcacccgcagcctgcggggcagctccaggctaaggagtcaacacgcagctcgagcccttggcccttgaacatggagcgctttacagacctggagctgagtcaaggcacgtttcccaagattttggggctcccctctcagggagagggaaggaagagtcggaaacaaagctgcctgttgcccccgtcccaatatctccgtccaaggaggtacaggggcagcgtgatggggtgtgttcctgctcttggaaaccacgtcggtaataagcatgaagaatgccttgaggaaacccccccccttcccacccaacccagcggcccgttcctgacattcccatcgcggacacacactgggtgtggcaccaggagcgtttaatcagaggaacctgtaccaacgcacccccaggccccctcaggaggcccctgctgccaaaatggccaaatgggctttctttttggtagcactgggcaggagggaggcaggggaaggagcgcggtaagaggcataggaggggcaaggaggaccttccacccaaagggacaccatgaccaactccccatggatggaaatgacaaaaagtacaccactggccccctggtttccgggtatccctgggagctcacgggtggacaccgagggtctccaggagaggggttggctctgcagcccctgtggtcccagctgctccaaaaacacccaaggagcaatttctgcacatacctatgagaatcaaagccaccgagcagctcgcagatccattcctccctctgccctcggggcctgaacctctctcccaggtgtctgcacctctggctccttctcagggtcctgtctcagcttcaacgccacctcctccctgagaccctcccagatcatccaggtgcggcccctgacatcagccattggaaccctctgctgggcactccatcagggcagctgtctctggtgtagtgattattcattcacttgcccgttgtcttacacatgcacacacacacatacacgcaggcgcacacacacacatacacacacacacgtacacacacacatgtgtgctccccatgagggcagcaccctcctctagcttgttcactgctcacctaaaatgtgagtcagtatttagcaggtgcttaaaggtttgctgaatgaataggtcatgccctgccttcctgggtcccacacagatagagaagtggcaggtgctgcacctcccccgccccaggctcagcaccaacaggaaggacctgtccacacagctaggccaaggagagagcccccctcatctcccacactgggtctctccagcaagtgcttatccagcacctactaatgacagaccacaaaacaccaacaaatgagaatatcccaaatggacgtcttcaggcctctccctgctctacctgctcctccacaagccccactgctcccaatcctcacaggccccgcacgtcacacgtggggtcccatggagccctgacagccacctccctttctcgtgtaggtgagcattaagaagaggctatctgaccaggcacagtggctcatgcctgtaatcctagcattttgggaggccaaggtgggcaaatcgcctgaggtcaggagttcaagaccagcctggtcaacatggcgtaatcccatctctattaaaaatacaaaacttagccgggcgtggtagcccacgcctgtaatcctagctactcaggaggctgaggcaggagaatcgcttgagcccaggaggcggaggctgcagtgagctgagatcatgacactgcattccagcctgggtgacagagcaagactctgtctcaaaagaaaaaaaaagaagctatccagcctctcacaaatccagagaagccccaatttcctccattttctgaggttccttgtccagggaaaaattaagaaatgtctattacccttttcacgttttgctggattccattttctaatttactaatacttgacttagaatgtggtgtctgtgaccatgagagtttggccagcacatgttcttccttctgatggcctcactggggttttgtatcaagattattctgggcttttaaaatgagtgtgctttgtcttttttctccattttttgaagatgctatttggagtgatttacttaggacgtcatttggacttaaagtttatattgtgtgaaggtttctcattacagatgcatttgcttctcacacatatgaaaataaccacaaaaaagttaaaatagatttagattaaatgttacttttcagggacccacctcataaatgaatacttctaaccccacaaaccctagtacagtgtgactggcttgttcaaagataaatgcagtcacgccttgcttaacaaggatgcgttcggagaaatgcctcattaggtgatttcgtcactgagcgcacctcacacacaggtacactgcacacacgcccgggccgcacagcctcctccacgccctggctcgatgggcaagcccattgcttccggtttcacagctgtgcagcccgtgactgtactgagtactgtaggccactgccacacaatggtgagtacttctgcatctaatcatagaagagaggcagcggaagtaagatctaaaagataaagcatggtgcacctgtatagggcgcttagcatgaatggagcttgcgggactggaagtgactctgggtgggtgagtgagtgagtgaggagtggacgtgagggcccaggcattcctgtacgtgtctgtagaccctacagaggctgcacgtttagactacgctaaatttatacaaaaatattcttctttcttccataactgccctcagcttacttcgttgccttatacatttcttaattttttaccttttggactcttttgtaataatacttagcttaaaacacacattgtacagctgtacaaaaataatttctttctttatatcctcatctatttgcttttccctatttgatttttttgtttgtttgctttttaaactttgctgttaaaagctaagacataaacacacacgttcacctaggcctccccggggccagcatcatcacatcaccgccttccacctgcacgtcctgtcccgctgggaggtctccaggggaataacacaaggtgtgccgtcgcctcccacgatggccatgcctgctgtcggatccctcctgaaggacctgccggaggctgttccacagctcacttttgtttaataagtagaaacaatacactctaaaatcatgataaaagttacagtaaatccataagccagtaacatagtcatttattatcatcgagcatcatgtccatgcatgactgtatgtgctggacgttcacactccaggcagcacagtgggttcacccacaccatcgtcactaaacacgtgagactaaagcttcaagctgagcagctacgacagccacactgggatggggatctttcaggtctgttctaatcgcacagccaccgcagtacgcatggtcttcactgatggaaatgtccttcttatgcagggcgtcatctgggagattttcttcaaggaaagatggatccacacaggagcgtggcccagtggtggacacaagcaggggtgagtcagagagagagactgagagagggagaggaggaatgagggagggagggagactgagagaaaaggaaagaaaaaacaaagagggagagaaaaggagagaaagagagggaagaaggggacagagactgaaagaaacggaataaaagagtgagagaagaaggaaggaaggaaagaaggaaggaaggaaggaagataggaaggaaggaaggaaggaaggaaggaaggaaggaaggaaggaaggaaggaaggaaggaaggactgaggagtatggttcagtgaaacctttgcacacaagggtggtggcaccagcatcaccaacaagagatgcaggtgtcctcagctggttgccctttgcacacaagggtggtggcaccagcatcaccaacaagagatgcaggtgtcctcagctggttgcaagcctcctcccacaccataggggatcagacagcttttcaaatgggtgaaagtcaaaagagaaactgaggacataagccatgcactaccactatctacacgggatgaggtaagtggagaacagagttttctggaatcagcagctctgcttgatcaacaagagaccagcacagccgatccggttctcccccgggttcccagcaccacgcggattccaaaccttggggcagaagtgggaaacactgagacgttcagccggcaagtctccgcccacctggaacagatgctcattgccgtgccctagggagactcccggacacaaaggaagctcccgggtcaggccctctggtccctgaggtttggcacttgcgggtctagaccaacctatgaggcgtgcactcagcttcatgtatgacctcagccaaaggccaacagagagctggcaacatgccccagagatgcgtaaagcgcctcctggtcacgctgtattcaaggatcctcaaagtggggtccctggatgcctccacctcccctgggactgcgtgggaatgcggattcccggctcctccccagacctgctggatcagaggttctgagatttgtagccccttaacccacccgccaggatgccagcgctcaccaacgtgtgagaatcgctgctccaattaaaacttcaaccagactccaaaaatacaaacgtggcagggggtggatttgaaatggaaagcgaagcaagctcaggaaagagccagctcctgcctctcctcccgccccctgagcacatgctggtctcttccaggcgccaacagtgcatggggccaaagagatgaaactgaaagctacagtgtagggcccaccgcttgtcttttcatcttcatggccaggagctctcagcccggctgcacgctggcctcacctgggaggcttctccaccacccacgcccacccccggactctgcaggcttggggttctctgccgggcttgcagcatgggggaggccggctgctatgccccggggagggctgcgtggcgcctgcctcctgcgtggggggcggcccccatagcgccagcatcttcctgtctcccgggcacgtgggcagtgccaccctctccctgacccagtttgccatcctctaggaaggggcacgggggaatagccgctgccagcgccttccctgaaataacctggaagggctccactctgggccccaggcggctgccatatggccacggcacagccctcgaccccaggcacgccccaccaccccccactgcagaaggggtgcccgccggccttcccctcacaccgtgcccccagggaacctccggagccggtcagaccctgcccatcccactgggagcttgggatcatgtctcacaggacaagccaagaccccacagcccagcgggggatgagtctgaagctgattcccggacagcccagcaaggctgggagggagccagggaggggccatgtgcgtgggggaggtggtgattttttagagccttcccccactgttccccttagaaaccgggtgagtgagcctgcacgccagctcccctcccctgcccactcctgctcagagcccagcagcctggcctgccgcagggcccagagcccggacacctcctcttcccaccgatcttccattttcagagggagccgctctccctcctctcaggcctgctccatctgtgacatttcccttccctggacgaagtggggttttcacccttgtgagcagagtctccttcagggctcctccgtgagagaaatatggggctggacagggtccccttccctccctcctcactcaccctaagaacctccagggacccagaggccacgcaggcacggagccagcacccccgcctcccccggggccagtgaccaggccgggaggtgaagcagtcctccctccctccggccagccgccaccccgacctcagccagcgtgcgctccccggggacaggagggaggctgcttccaccgaggcctctgctgacagatgtccgggcccccacctggacctacccagacctaagctcctgggcgggtggtcccgtacgcgctgcctttcccggtgaaatacggtttccactgggagagtctgcccccggccagcagcccgcgcacactgctcacacaggcacacgcatgcacgcacacactctgccggggaacatctgttttgacaaacacattattcaagtcagtccatgggacgtgaattgacagattcctgggcgcagcctgcgggctttgtgcatttgcacctgagccgagctggggactctgatgtgtttgtcccacgtccccttccccccctccaccccgcccccaagaagacaagtccaggccctgagccgctgctgtctgagaagcctggggcgcactccccaggcgagcggggccgtgtccatcgggtgccaaactttgcctggaggggcctttcttaaaagcctggggtgggggccatgacagagccacagcacccctgcagctgacacccggcacccaggaagaagcccgtcagcccttcccttccgagacgatcctgaattccaagcagcaccgacatgccagcagggcgagccgctgctccccgcacccagcgcccccggaccccacgctgaagggcattctccatccgctgcaagataaactttgtctgggcaaagagtttccggctaaccccctgtgatcaacgccgctgcagctcgggtgcagaaaggcgaggggagacgggaagctatttttaggagaaaaaaataaatctcagcctacctttagaagcgagctgtgccaaggctccggaggttcacctcggagacaactgcagtgtactgtgtcagattacaaactgggggcgagacggagggagggaggagggggagagggagagaaggagggagggaggagggggagagggagagagggagggagggagcagcagagggagagacagggagcgagaggcaggcagaggcggcgcccagtcaacattgcagggcattggtgtgtctgcactgcttgcattcagctagacatgattcattagttttctgcaggcaggcaagcaggtcgagagggagagagggagggagagagagggagagagagaggatcatccgccatgcagcagtaaccagagcctctgaaacgtcagtgtttgaacgcacacacacacacacacaaatacacatgcacacacacgtgcgcatacacacaccaagatggctatacccctcactgccagtttctttcacagagctgtggtgaaaagctcggacagagatggaggcaaacagctctcagccatgcggggcttggggttggtgcttttctctccatccctgggaaaacagcacaggatcttccctgcaggaggccgggggtctcctgcaaccgacaggcaaccgatcagcacatcaaagtaaaagctgccctgggctctactccaggaagctcagaaactcaagcgccctcagaattaagtgatgaagaggagcgacccaagctgcctgggtctttgctctcctgtccggctcccctccccaccccaagcctccagtggccccgcagattcccccttcccacagaacttcaggtggtggcacagatatacccgctacctagcaaccgggtggtgcaggagggaaaaaaccctgggaaacacgcacggacttcacacacttgcttccttccctggggtaaaaatcccatggcttgttactgaaaggtgctgaataagatagctcatgcggaggaaagcccctttggtattttgggctccacataccctaattgaggctctgagggctcctactaatgatggccctgtgcagggacaagactcgagtgtaggacacgagaattccaaggaagggctcaccacgggtcctttgtacaaaaaggaaggacttgtcccgaggtgctttctgttgcttctccaattaaggctcactttacaagttttttaaaaaatgggctccttagtaaaaccaacacatcctaccatcaccgtggttttgcttgtgatcttaaaggaatcgcaaaggtctcaaacctagacagccagaggaaacctcttcccaagacaactttttcaacactgtggcagacgggtccagcgagttttcccagtcaggactcattttggcctcccggataggcttctgaattatatgcctctgaatttggctgcaagactggaggcttctttcaagccccgtgtagagtggccccagcctctgtgcatggaacaaagagatacgtgctgtatccaggagtaggtggcaaaccacagatgattccttttcaccctgcagcagagttatcaggtca

SEQ ID NO: 517 - DNA, 164689 bp, Homo sapiens
  source 1..164689: mol_type = genomic DNA
aggatcgcttgaacttgggaggcagaggttgcagtgagccgagattgtgccactgcactccagcctgggcaacagagcaagactctgtctcaaaaaaaaaaaaaaatgtatgatggaagacataaaaagaacaagttggatgcagacagagctatagacctggaggccagtacgtgactgttaagggagaaaagcaaggtactaacttctttaaaaccaaaggcccccaagtcctgatcaggtgtgttgcaatgtgctggccagcgcctggggaaggtgggatgaataccaccaccctggtcactttggatggaaaaaggatagcagcagaacggatacatagcttttacttatttactgaaattgcagaaaattttatgatattgttgcaaatatagaggaggaacaggaacaaggactgcatgccatgaacaaattaaaaataaacacagattgggccgggtgcggtggctcacgcctgtaatcccagcactttgggaggccaaggtgttcaggttacctgatgtcaggagttcgagaccagccttgccaacatggtgaaaccccatctctactaaagctacaaaaaaaattagcggggtgtggtggcagatgcctgtaatcccagctactcaggaggctgaggcaggagaatcacctgggaggcagaggttgcagtgagccgagatcgtgccactctactccagcctgggtgatagagcgagactccctttcagaaaaaaccaaaaccacatttagaagctgggaatgtgggtaaccttttgggggatgtaacttttctcttgaagcttttagtatactttttctcagacatgagaaagacaggtaattgttccatagaaagttgcatacggcaggagaccctgttttattaaagcgagctgtagtccatctgcatttggagttcacagcttcccctgtgcccagggcccccttcagatctagggtccagattcctgcctggcctggtacatggcaggaaggactccggaggagaagaggctgtgccaacagcgagggtagcagggccctggcactgcagtgtctcaccagtcagggaagggactcaaatgccatggcctctcagcccaggcacttcctgtccttggaaccttgtcccctcctcagctgggcgaggcttctcctggtttacttgacctttaggtgggcagactggggaaggggcctgcaaaagaaaccgactgcacctttcttgcaggggattctgtgccaaaaacagatagaccctttgtgcccaatgtgggccttggtagccgccctagcgggatttgcctagcagatcacctgatcttcctccctggcaggggagtggtggggatcttactactgggccttccgggcctgctcctgccaggacccagtcggggaggtgaggatgctggtttagacccaatcacttggacgaatctgtcggcggcccctgtaacttgccggatggcggggtggagagacgaagctggagggagcagagcgcacaaacatttatttacaaaagtcccagttacatatgatacaggctttttacacacagtagttgaaacggaattattttatctatttttactaccagaaggtaaagaaaaagtttaatgaactaatcgtttcttgtttttatacaaagtgacagatcatgcacatttttttcagtttttaaatattttgctaagtgcaaatactagattcctctctccagttttaaggcaagtaagagggggctgtggctggggagcctcacgccctgcggcaagccctgcagggcagagagagggagccagctgcctcagggttgcctgttgtctgacctgctctctgggcactggcacggccccttgctggctggtctgaagacccccagtgcttctctccccaatgctgtcactggtccaggcaggagcccgaggttcaggccctgcctctggacagaggggcctggagaaccagggtgggtgctcacggcagccctgtggtcccccgtgcctggctcggggaggatcctcaggaatcagggaccctccaaggaaagaggccgccgctccttccccaccagcccagtgtggccagaacagctggaactcctctcaaatgacccacccctggggtttggccttaggagaaacatcactctgggctccccctcccctgccagggttgaggccagcacctgtctagggctgtttctgcagctgctgcctgctccctttgtcctgcctggggctcttgctggagccacgtgcctagggtacagggcagagggagctgaggctcccagggcctgaggtcacctcttcagctgtgatgtctacagccgccctctgctcccagagatcctccctggggaagcacagggagcatatttaaggtaccgaagacaatcctgttgctgccgcatggagcctgcctttccaaggcactgtcgttcaggctagtagcaaagttcaggcagtccaacaggtatgggcgccagcaaggacatagcagcaggctgcccccaagcccggcctccctgcgcacccttaccccaggtccaggtgaccacctgtcttcaaagcctccatcctgggcaaaggcagaaagaatgggtatcttagtttttttttttttttttttaaagatagagttttgcttttgttgctcaggctggagtgcagtggcacaatcttggctcactgcaacctctgcctcccaggttcaagtgattctcctgcctcagcctcctgagtacctgggattataggcatgcgccaccttgtccggctaattttgtatttttagtagagacggggactcaaactcccgacctcaactcatccgcccgcctcggcctcccaaagtgctgggattacaggcgggagccaccgcgccgggccatcttagatcttagagcccactttagtccttgaaatacatctgagaagccaatggcagcgaatgacggtgcccgcctgccccaggcaccttgggtgggccaggccctgcttcaggaggtggcgggccactccggagactgatgcagccccaccccaatggttgtcggactcagctgtgtctgaggtctgtgaactcccagcctctcagaaccccatggcaacacgacaaggacaaggcagggcatgaggaggaggagaaagtgatgcctgtggccaggaaggcttcagacctctcatctgtcaatgggccagagtgatgcctcaggcaccgctagaaacccagggccggacaggaggcgaggagggtgagtggggacatggcagggctgagctgatgctcagctgactccatgagaagggaagtgaccttcacatgggggatactggacagcaccctctacctgccttcagcaaccactgagaacacccggggcacacacggggcaggggtggcacccagggtcacctgtctccctaaggaggcccactcctcccccagaaagccaggggggaaaagctgctcatcacccagggtggcagaaacgtctcccccagcagttgggctgcccagcagggccaccaggcctctgtcccagctgccttaagaggctctttcaatgggccagcttcagaaccatccagtgtaccgcagcggcctggcctgggaaaggatttctcagcctgactttccagagaccgaggatgagaaagttaggcggcaacagaacaaaacccccgccgcgagatgggtctgctgctgcctcatctgagtaggtgtaagaggggaggagaggtgccctcaacactcactgcagtggcgcacgggttttggatggggggacagcatcttggccctcacagctgtggcagtgcctctgcgggccatggtcccagccccccaccctgagcaatgcttcccaggcccgcaggtgcagccccctctgcccttggcccaaccgtgggcccctccagggagatgctctcggctgccttgctacccaggggtcggctccgaggagaggcccaggtgtgagcagcagggacctggtctatggcctatgccatggacaaggcagaaggactgccgttggtggcctgggggatgcgaggggaggggcagttcacatcgcagctctctccgaactccaccatttgggacgtctttattatggatccgtccactcttccaggagcagtagcccttctaggaaaggggtgggaagaaaaccagcctacccttcaagctgacttaggatgcaatggtacagacaccagccttgggggagggttctccatccacactcctaccccaaacgggctttgtgctgctcaatggggattcggggccatcagaagcgatgccgcggctgggggccaaagtgcatgggcaggttgtgctccaggggcatgtggatgggaccgaagtcatagttgacccgcacgttgggcagagggggcacgtacggggctgggataggccccatgttgagtgggaagttgttgaacacaggccgcacgggaggcagggggaagggtgggtgcgcgaaggcatagggtggcatctgtggctgtggcaggttctgcggaacgggcctcgggagggcctccaccctctgcaccttctccacaggcttctccagcgggggtccaatgcgtttgaaggtgttctctgaaagggatgtggggattagtggagaaaaacattaaaccaacctcaatggaatctagcctgggaccagggcagcgacctctggacacgggagtggctccacatgctgatcaaagcacaaaacgtggacacctcccaaatgccactgcaagaaaccaagaacaaatctgtacttccaccagtgtcttgctccacagtggcaccttggaaggtggcacgtccacccacccagccagacatccttcagagccagggccttgatgggccacctcagtgactcagttacttttttttttttttttaatagatggggttttgccatgttgcccgggctggtctcaaactcctgggctcaactgatccacctgcctcaccctcccgagtgctgggattgcagatgtgagccactgcacttagcctcttttttttaaagaaaaacagatggggtcttgctattttgcccaggctagccccaacctcctgggatccagtgatgctcccacctctgcctcctgaggagctgggatcgcagatgtgtgccaacacacctggcttcactgcttttcagcctcagaaggatcagctgggtctacttttctttagccaggtgtggcttgattgattcctgagctcaaacccaccccttgggacttcctcaccatcaaggagatgccaaaactatattcaaggcgttgaaggcctttccataagcctgagatgtggccgcgtgggtgaagtcaggtctatagccacctgagggacagcaccccctcctctcctgtgctgggttgagtgccaggacactcagggaggccagcagaagcctgcatggcctggctgctgctctgtcctgggggcctggggaggggcacttgcctccattctttcttttctgttcctcttcagcctccttctggatttcctcaataagcttctcatcatcttcctaaaacgcaagcaatgagaaggatgaacctgtagcttcatgcagtgctgaggccccgtgggacagtgaggaggccgcttgttgcttatggccatggaacaagcccgaagcctgctgctggccagtggggcctgggctgcacaccgttccttcctatttccccgaaggcctccttccttcatcagcctgatggcgttccacaaggaggccatccacaaggctgggcagaggggtctgagcatggcaggcagctgcctggtgaggtggggggatggagggcctccatgcactgagctgcgtgcaagtggtggatatgagaagggtttggagagggctgggtctgagtgggcacagcctgaaaagtttcagatcccaagtccacaagcgctcggcatggcagcctgtctgcagagcctggaaaagtcttgcagatgtcctcaactgagatggacaaatgtccagtcgggccctgcttagcccccaaggctggccttggctcctgggccaggcctcggggagaggaggaaggtgcgacagtgaggatggtccccctcggaccttgccgtctcttctcccaaaccccatgcttggtaggcctgaaataacaaacacaattcacacttgggttatccaagcctcagacacgaaccgaagaggcactgtgagtgcaggcagatgtgggagctgtgctgggaaactcaggggccacactgggcaagccccagaggttgggtttttgccacatgcagctcccacacccccacctgccagcagacaccatggtgggaggaccgggctgctgcctcaggacagaccacccgtgatgcctgcttcatgagtggcgcttaccttaacccccctcctcagtgacccacaaaacagctgtgcagtttgtgggactgaaagacgattaactggattgaaaaaacccgccaagtgggtgcccatctttcctggctggctgcagggccaaggggctaaggtgtgggcccgagggggctgaggctcacaagcagcagagtggcaacaccgtggcaaacccaaacacgccaactgccggctcagcaagcaggaaagagatagctgactataggagggctctgttccctgaggtcctccaggagttgagagcagccgagctggggagaaggatggggagggatggtggtccctgatatcgtgagaggattagcaagtcccaacaatgcaagcagtctaatgaaagcacatttattttcctagacacggcgtcagagcctaaatatctggccaatttctttgctgtgggttggaatattaataatgatcagtttggattttttcatgccgatctgatgacacccagagcagcaactggaaggaagacaatccttggcccagtagaagatgggcagccccatcgagggctaaccaacggacagtttgcaggtttacttactaggttattaatgtcacagccaagacagaaatgagtgatttccccacacaattgtttgtgaaccgcaaggattctggagttaggaatttccttcactaaacgtgcactgcatgcctactctgtgctagacactgttctaagtttgctgattaaacttcagatcaacaatgaaacagaaaggcagatggactgagtaagtaattagataacacattcccttggtttggtagatgaaagattcttagaataaactccctggagattggttctatctgcaacagtggatgacactattaaattctcctacattctctaggcctcagatgccaagtgatgggtttggactaaaaggtctcataagcttctttccaactctgacacttggacattcttaagatactcaagtctgttttcagcaaaaggagcctccttgctgctgcctggccacgtgttctgagcaaggcatgaagagaggagaggtgacaaaggtcaagttcccatcatgcatttcaagagttgcaaagtgcccaagcacaccacagaatcctatgtctggaaggaatcctgagggagctgtctctctccagggttaacacataagaattctctatcaaaacccccagatgaggtcatctagcctctttgtgaacactccacaagggggaacttactaccttcaacataatcactaagtgagtcaacatgaaggactgcagtaactcaagagggttgggtgggcagtttgaaggcctccatgtgaatatcaaggtagatgctatcaactctctagactgggagctggcaagcctcttcattttggagccagtggcaggcctaagaaaaaagactaaaaaaaaaaaaaagaaaaaaagaaatgaaccaaaaaaccccaacaaattaagcgaactgatccagaaaactggtgggaggatcacttgggcccaggagtttgagaccagcctgggcaacaaagtgagatcctatctctacaaaaaatacaaaatttagccaggcatggtggtgtgagcctgtagtcccagctacttggcagtgatcgtgctactgcactccaccctccaccctgggcgacagagtgaaacttgtgttaaaaaaaaaaaaaaggaagaaagaaaaaagaaagaaagttgtgcagcaggagggccgtgggcctacacctcttagctaagtgagctcggcaggttcctgagtatccctgcgtccaggaagctcatctgtaaatgggctgctttgttaaggactgaatgagctcaagtatgtaaaggatgtagcccaaagtaaatgctcatgattaggacacaggaacactgaaaaatgacaggtagagaagtttcatgaagaagtggtgcacactgggagacacccacagtatttctttcaggggtcctcactctggtccgttactaatcacaaccaacaggactgcacaaccaccactctgcctcacctcaacctctgccgcatctcctcgatgcagttacaccatcagtccccaagggacacttatggccttcgatggcacaagggggtacctcaggaatcattcattccaacctctgtagcacagaaactgaggtccctgagaaagtaccttgttcaatgttacggctagttggcggtaaactgggacaaacacacacaccgggccactcaatggtcctcctggaggaaatccacagaaaagatatcctgaaggtgtccctgccccatacacagcagccacaccagtcaggaccgtgctggacgctgcagacacagtgaggagtgtggcagccttggccctccttgtgagggcctcacgtctctgctatgagcaacgttccaacgggcacctctctctgaaattccacatggatagaaggggcaatttcatagcattaaagactagacactcggtggttcacgcctgtaaccccagcactttgggaggctgaggcaggcggaccacgaggtcaggagatagagatcatcctggctaacacggtgaaaccctgtctctactaacaatacaaaaaattagctgagcgtggtggtacacgcctataatcccagctactcgggaggctgaggcaggagaatggcttgaacctgggaggtggaggttgcagtgagccgagatcgcgccactgcactccagcctggcgacagagggagactctgtctaaaaaaaaaaaaaagactagccactaacccccttttttccctcagactctcccctgataaaacacgagggacaagagaggctctcttttggggagaagagctctggccccctgtggcactgctgaggctgagagcatgcaggccactgcctgatttttatcactaagcttccgtgataaatcccagtgctcctgaataaatcctatttcagaactccctcagaagggtctgaggcacctgcataggagcgcgagcccaggtttctgatacagatcggcggggtctggaggacactgcagatagaaccttcccagcctgccattcagagttcttcctggagaggaagagggagcctcagagtcccaagggaataaaagtgtcgcatcctcaccctccgaagacagccaccccagagcctttcttccaatccctccctctgctctgatcactctcctgattggcaagtggaatcaagaccatttgcccttgagtcctgtcttgggagtcacgcccttaggagtctaaagacagtctggtttgtatttcacccaaaatgacggcactcagctacaatgacctacaattttatcataaatcatgagccaactgtcagttatacctagatatagggttaggtgtttcagatttcaactgtctccaactggctagagtcacaggacactgtgcttaataactttaatacaacttaaaagttttttttcttttttaaaataaaaaaattacgcttttagctaatatgttagactctaaagggaagatttctttccttttctttgagacagtgtcttgctctgctgtccaggctggggtgcagtggcaccatcatagatcactgcagcctccacctcctgggctcaagagatcttcctgccctagcctcttggtagctcagactacaggcgcccaccaccatatctgacttttttttttttttttgtagaaatggggtttcaccatgttgctcaggctagtcttgaactcctgggctcaagcgatgcacccaaccttggtctccccaaaatgttgggattacaggcatgagccatcacacccagctggaagatttctttcttaatttggggaggaagttccttccacaatcagtttctctgaagcatttgaaattcctcaagtcaagagtgaagacaggccaggtgcagttggctcatgcctgtaatcccagcactttgggagttcgaggtgggtggatgacttgaggccaggagttaagagaccagtgtggctaacacggtgaaaccccatctctactaaaaatacaaaaaattagccaggtgtggtggcgtgtgcctgtaatcccagctactctggaagctgaggcagaattgcttgaagctgcaggtggagattgcaatgagcagagatggcgccactgcactccagcttgggtgacagagcaagactctgtctcaaaaaaaaaaaaaaaaaagtgaagacaattccagtgctttgggaggctgaggcagcaggatcgcttgaggccaggattttcagaccagcaagggcaacacagtgagaacccagctctacaaaattttaaaaattagccaggtgtggctactggggggctatttgtggggctgaggtgggaggatcactagagcccaaggaggttgaggctgcagtgagctatgattgtgccattgtactggcacaacaggggaagatcctgtctcagaaaaaaaaaagtgaagataactgaattgtaaacttaaaaatggcaaattttatcttatgcttcaccacaattaaaaagagggaggggccagaagcggcgtcttgcgcctgtaatcccagcactttgggaggccgaggcgggcggatcacgacgtcaggagtttgagacaggcctggccaatatggtgaaacctcatctctactaaaaatacaaaaattagctaggtgcagtggcaggcgtctgtaatctcaactactcgggaggctgaggcaggagaatcacttgaatctgggaggcagaggctgcagttagccgagatggtgccactgcactccagcctgggcaacagagcaagactctgtctcaaaaaaaaaaaaaaaaaaaaaaagagggagggagggtttaggattgattttgaggttaaacatgaggcctagtccctcataagatacttcttggacttgggataagtgacagatggggtattgagtccattctggagtcaagtccctcaggaaacattccaggcatatgagcatcaccatcctgtgaagaggacacttggaaaaaggccacgctacaaatctaggacacacctaggctgctgggagaggggaaaaatagaaggaaagaggatgaggaggagccaggggctgagctggatcacagcacaactgtcctgctgtctcggggctgagtcacaaacaggaaaccctggtggtagagctgcctggatggcagggtgaactcattttaaagcagtgctggcttcttcaagagaggctgctggcgtcacgggaagaactacaactctggggctccagacctggcttgagtgcatatgcagctctacccccactacctaacctggaacccactcctttccaaaacaggttagggtgagaagccaatcatctcgtacctttttttttccctctagacagggtcttgctcagcccagggtggagtaaaatggcgtgattatagctcactgcagccttgaactcctgggctcaagtgatcttctcaccttaggctccccgagtaggtgggactacaggtgtgtatcaccatgcccagctaatttttaatttttcttatagagatggtggtggagggggagttctcactgtgttgtccaggcaggtctcaaactcctggcctcaagccatcctcccacctccgcctcccaaagtgcagggattacaggtgtgagccactgcacctggtctgatcactcttataaagcgccaagcacagtgacaacaacagtagttaacatgcactgagagattactatgcaccagcccctgtctacacacctcacatggacctcagtttcaccacagctccctgagtcaggcactatgaactgattgccacgctgcagatgaggaaaccctggcacagcgaggttgtgacccaggcaatctcgtctcaaagcctgagctgttaaccacataacccctcaggtttctgaatcggaacttctggcaaacctgactgggggcctgagaacactgctgtcgggctgggagcgtgtgtcagaggcaactgttctaaggtgtgctttattctataaagagtgcagaaacacaagagggttccttctgagaagagcagaattctgaaacctcctttctccccttacaagacgtaacaggacaaaacaaaacaaaacacttctactcaaggaaacaaacagccaaaacgcagagcaaggggctgtgttttggaaatttttagggaacaatcctccttttctcaggctcagcttacccagaagtgcatgtgccatcccctgaaacagcccacttgtcggcctctggtccctggcacttgtcctttgggatgaaagccagtagattcctcttgcccagagtgggagtggggagcttgggaaagctcataaccctcatctcttgagccagaaatctaagctgcacatgggggcccagcactgaggtgagaggctgtagtgcctccctgggtcactggtctccagtggcctctgaccaggtgctgttctcagctcactggttttggtccatctcaaaggcagaagcgaatgcttcaagatttccttgcctgacatgttttctcctgacactaccaagttacttgaatcccatgggggtcccatgacattttctctttctggcctcttctcgtcacaaaaaactcagggatttggttctcatcaacataaaaaaaaaaatgccattatttcttttccttatacatattgattaaaacaatcttgggaaacattgaacaaaacaacacagctaaaatcagccgtaattcctcaccagagatcaatcctgggaacattctgatatcttttccattggctgcttttatatccacacttcactgtcaagcccactcagattccattgtagaaggtcacgctctgcccccacgaggtcctgctgccttgtacggattgcttagctcacacccccttctccacgccacgggaggctggcaaggatttcataagaggaccctgaggctcagaagatgcagagagtggctggaccaccaaggtgggcagtgtgctgaggccagggcaggaggtctggacttgtaggttccaaggatggccggcagttctcaactctgcatggctcaggctgggttgctgggctcaccctggacagcggtctatagaggttcacctgaacctatttgagatctgagttcctgttcatgccatttgccctggccagtgggggcaggaggggctgctggctgcatctttactcgctgccacagatccatgacagaccatggtgcatcccctcgagggctgcagtctctgtgcctcatccttggtttctggcacaggccttaagaaggacccagctggcctgaatgagttctgtctctgctctccttctggcccctcctaatcccagtgaaaactttcaaatgaattctcagcacagctcctttctgatgagcaaggccaggctgaggtgagagggagtggatgctgatcagcgaccaaggtgtccctggatcagcaagggctcaaaagaacaagcgtaatgatgtgtcaggccagggtagaagttagccctccaatcacctgatgtcaggggttcgagaccagcctggccaacatggcgaaaccccatctctactaaaaatacaaaaattagccaggcgtggtggtgggtgcctgtaattccagctacttgggaggctgaggcagcagaatcgcttgaacccgggaggcacaggttgcagtgagccaagatcacgcgactgcattccagcctgggcgacaagagcaaaactccatctccaaaaaacaaaacgaagccctccagtgccccatcgctactccagaaggtgtacctatggatcacagtgggatccaatgagtaccatgacgaagcacacgaatggcaccacagtgggcagtgcaccccaaatgcagtgtcaaggacaaagggtcaaagcagagagtgaaacgggagtctcacccacccagcggaactggaagagcactttctgttttttttgagacagagtcgtgctctatcgcccaggctggagtgcagtggtgcgatctctgctcactgcaacctccgcctcccgggttcaagtgattctcctgcctcagcctcccaagcagctgggagtacaggcgtccgccccatgcccagctaatttttgtagttttagtagagacggggtttcaccatattggccaggctggtctcgaactcctgaccttgtgatccacccgccttggcctcccgaagtgctgggcttacaggtgtgagccactgcgcccagctggaagagctggaagtaaggccgggtgcggtggctcatgcctgtaatcccagcaatttgggaggcctaggcaggtggatcatttgaggtcaggagtttgagaccagtctgatcaacacggtgaaaccccgtctctactaaaatacgaaaattagctgggcctggtggcgtgcacctgtaatcccagctactcaggagggtgaggcaggagaatcacttgaacccagtaggttcaggctgcagtgagccgagatcacatcactgcactccagcctgggcgacagagggagactccctctcaaacaaaacaaaacaaaacaaaacaaaaacaaggaaataagcggattgcattttaacagggagggagatttgtttcctttccttgaattcctttgagctcagcagggcgcagaaagaactcagcctgacacagaagactctggcttgctgcctgctgcatgcaggtagggtgggtgggaggaagacgcagcaagagcttgtggggatggcaagcacccggcctttccagaaacgtgctgcacttgaagacggcaagtgaggtagaatttaccagagaggttttaattaagaagagagaaacaaaacatacacaaacatcctcccttagcttgtccctccacaaatatgccccacagttctgtccacgcagcagggtatagacaggagaaaacgaagaaagagaaactatgagtgattaaaaaggggaaaagattcaatttattttcacaaatcagatatgaacagtaatcagcagccacaggctgactgttcccaaaataaccatttgagcgcttggcacaaaactatttttgccaaagcctttacggtccttttgagactttttttccaacacttctggtccccagggctggctgtccacgtgcctgctggccagcctcctgtgaccatgggggaagaacgggtggcttttcttcttcattgcacttttcctccccttagaaagctgactgggaattgcaagtcgactggtgcttcccctctgagattctgggggtgggttggggctgggatccaggtcatgtgtggccacagctgttgttaataaacttgcaatgatttcatgagaggcttccaaagagcttaagatttagtttcaaattattcccagattagccacagatcgcctgagcaacggcagacccttagcccccaccccttgctgtccccagcaacaggaagttgggggagggagcagcagagcttggagtggcacatgctgcgcagctgtggctgggaagggcagggaggcaggacagtgtgctggggaggagcagagacttcacgggctcagggctggccctggcttctgcagccacctcctcaggtcagacaagcccagcacccaaataccactatctggagcacttcccccacaaggacctggagatgggggcagaatgtggccatgttttgcgtcccgtcagggtcaagtgctcacccaggggcctggtgggatctgctgaagacatgtagcaacaagcaccaacaggccgtgtgtactggactgtgctgccctgcttgggaaagccctcagtgacatcgaaaccctgtctgggacactgctggggtagcaaaactgccagggcccctttctactatttgcagcttcattcatccatggggaaagagtctggcgaggtccccacccctctgcaagggctacctggttcatggggctcagggaccctatgggcacctaacgaccatgtatttgtggcaggagccagacactggttggaagacctgggctcacatcctggtctcaccaagctagggatcctgggctagtgacctacacatcatctccctcatctgcaaaataggaaagcactgcctcccagtcccatgcagtaaaaatcacactgcatagcacgctcacatggtgttggctgtgtggctattaagaggaagatgaagaaaccgaggtcagttttgatgacagatcaatgatcacacccaccccactaacttcacttttttttttttttttttaacacacaatgatatttatgacagtgatgagaaataacacgccaaagccagctgtggaagctgggtgatgggacaatctgggggctcactttactcttttgtagaataaatttttaaggttaaggaaaaaattctgaagccaaaaatcagtttccaacctaaaagtctaaaatacctttccttaccaggtttctgcgtttcctcatcaatcctccctttcacagccttcctccctaattccaacaacatcatgtcctttcccctgccgcttaagccagggtcccaaaggtccccaggactttctgcatgcctgatccaccagggagatgctgcgctggcctgaggggagaaggcaggcctgggaatactccgaggacaaatgacccgggtggaaacccaggctaccatttactggccacagtcttaagcaagtaaaaccaggatgatacatctgccttcgagcactgctacagaactgaatgtattaacatctataaatgttaggctcagtccactgctggtttggaaaaatgagtgtctcttaaccaaatggctaggcgataattgtaccaaattaaactggctgtaaaagccctagggttttatttgaactggacaggtttcaaactcttacattcaaaagacaaagacactgtagaaaacaattctctgtagtttctcgtagccaaaacccaagacaaacacggactttgttttgtattgaaagagaacatgctgttttaagttttgccatactctcaaatccagactgccaggtgcctgttcctctcacaatttgctccccacctcagctaccactcctgtggccatgcaaggaccagtcagtatattcacgttcagtaaagttccaggatcactcttcccctactgcaaaataacgtctgttcacttatgtgtcaagagctggctttccactctgctccctaatccagaaaactgtggtatgctgtgactgttcgcttctggttttttgcttcctaaagaagacaccttctttataagactcttagttgaatgcttttggcttcattttgataactaacagagaaagaaagttactgttcaccacttgagctcttactgtggagtggtagttcaggttcccaagcaatccctagtcattaaggatgaaaactcaacttccctccaaaaccatgatgggacaactccctcgctgacaaataagagattcttcctggccctgctggttaattaagccagagaacaggcttgtgtgacagtgcatgctttgtttcactgaacttctgaatggctttgtgttctcagaagccccaacagatgctgggttggaattcgatcggtctcctggtgagaatcaaggaaacggggctgatcgctgttttgatgggaacgggacaaacggaacagaatctccggctgtggctatcagaggaaattggagggatttgtatttgcctgaccttcctttcaaactttattttgagcaaatctagaaactttctcaggttagaagatgacgatccaacaagaaaacaacaaggcagtgcatgctatggcacccaaacaaggaaaaagcacatgagaaacccacaccatcaatcccaggcatgggaagcaacgggaggaggcagcagaagacacagaacgaggaggagaagaaagaaaaaagtgctgagaataggccagactgttaacacccaccctcacgctaactcccactctgccctttgtctctagagatgaaatactgcctgtggagctcttcatagctccagctgaaaaaaaaaatctattttttcaagattcatgaagttcctagagatggttgcctcccactgtgctagctgccagggggctgaggaggtgagtcagcagaagggctgtgcctgggaatgtctgtcacacaggggcacggcctgccttgtgagcacttcccactgtgggctgcacctcccgatcacccagcaaaagaaggatgactcgggcttggctttctatgtacaaaaagcctccttttcttccacacatctccttagtgacaggagggcaggctagctaagggtttcactgggtcataagctttgtaatctgagtgatttttaggggtctcttatcccagcttcccacccagttaggagcttgttccgtgatagaacattcctgaaatagagaacacctggttaccacagaggactcacatcttttcaaaaccatgagtagctctcaggattatacatttctttccctttttttgagacatggtctcactctgtcacccaggcagaagtgtagtggcgcagtcagggctcactgcatccctaacgtcccgggctaaagcaatcgccctggaaggagctgggaacacaggtgtgcacgcaccaccacccctggataactttgggattttttgtagagatggagttttgccatgtttccaaagctggtcttgaactcctgagactcaagagatctgcccgccttgggctctcgaagtgctgggattacaggcatgagccactgcaccaggccaaattacgcatttctttttctttaagatcaagtcttgttctgttgtcctgggtggagtgcggtggcgcgatcttggctcactgcaatctctgcttcccaggttcaagtgattcttgtgcctcaggctcccgagcagctgggaggccctccccgcaacaacctgtagtggctgcgcagcagcccccttggatgggccccacaccctctcctttgccgcagtccccactatgccttcctgcctcctagacccagacgtctggatgctccatccagacatcatttctgctaccacctgcccctgtggtaacttgggtctgtgaccccagcaatccatactgtttgttttcgatgtgaaaatcttcctgtttcttttcttccatgttttaaagtgtagatatatatagaattactttttgtacaattctaatgtaagcatatataaaatttgacatatctcctgttttttgggatatttaaatggtgtttctaaatttgtacaactttaaacaactcagtgaacagtgttgcagacagaactttgtgaacttgtccaactgtctcctgcggataaccttttctaattaagaggaactcccagatcaagtacacgcactacatcttcggatctgtacacagtaactgcccactatgcccaattacagtgtagcagatgccaacaaatctgaaaactacctaccagcagccaggtactattttcatttccatttatttgattattaggggtggctgttagccaactccaacagattgtggccaggtagaaaagcaagcattttttttttttttttgggggggagacagggtcttgctctgtcacccaggctacagtgcagtggcaagaacatggctcactgcagccttgacctcccaggctcaaatgatcctcctgcctcagcctcccaagtagctatgactacaggtgagcaccacatctggctaatttttgatattttgtaaagatgggggtctcactatgttgcccaggctgttcttaaactccaggatgcaagtgatgctcctgccttgacctcccaaagcttacagacatgagccactgcacctggccagcaagcagcttttttccctacttataatttttttaaacttcctctgtccatttttgagttgaggtgaatagaccatagggagactcctcagtataacatcttcctccacagacattctggctgggtctgtgatggctacttcttcccgtctcacttgcagttgaggaagaatgtcattaagttctggctgatgggactgaagcagaagtgacctgttgcagcttctggaagcctaacattccttaagagatagggaagcaggctctttagcctcactgcagcccctttgctgcttggaatgtggatttatcagccagagctccttttcagacaatgacctcatgtgatccttggctatgatctaggggtggcagagtagaatgctggaagcaactggatcccagataagagctgctagcccacccctgggctgttcatctctgtacttacacatagaggagaaacacacttctgttttcctttttttttgagaacccaaagtgccgggattacacccatgagccaccacacatggctccacatttttttttttgagacagagtctcacattgtcacccaggctggagtatagtggcacgatctcagctcactgcaacctccgcctcctgggttcaagcaattctttctcagtctcctgagtagctggtattacaggcatccaacaccatgcccggctaatatttatatttttattagagacaggtttcaccatattggtcaggctggtcttgaactcctgacctcaggtgatccacccgccttggtttcccaaagtgctaggattataggcatgtgacaccgtgcctagccttaattttttttttttttgagacggagtctcgctctgtcgcccaggctggagtgcagtggcatgatctcagctcactgcaagctctgcctcctgggttcacgccattctcctgcctcaacctcctgagtagctgggactacaggcgcctgccaccacgcccggctaattttttgtatttttagtagagacggggtttcgccatgttagccaggatggtctcgatctcctgaccttgtgatccacccgcctcagcctcccaaagtgctgggattacaggcgtgagccaccgcgcccggccaatttttttttttttttttaatgagatgggggtctcactatgttaaccaggcttgtcttgaactcctcggctccagcgatccgcccaccttggccttcaaaagtgctggcatcacaggcgtgagctactgtgcctgaccctctcccccagtttttcatgtatccctaatctttgtttatgatgtcatttgccagtgagaatttattattttttagtctggccttgatgtaatgcaagaaaaaccttatcttctccaagattataaaagtcattcccttcatgctgtcctctctctccccagcgtagtagctagtgtgacctgggaaacatagcccctacaatgccctgaaatggctctcatcacactccagatctgaggccggcccctgggccaatcgctgtcacctccctgtggctctctccacctgcaaacctcacctgctttctttccgatccccaaacagaccctatgtgtttaatttccttgccagccttgctcctcctctaaaatactgtatttttaaagcttaaatcaagaagaaatatttgatttgatttcttaaatgtcttctcaccatctacagataccatataatgatttacgttaatagaattgttaatattaaaccatcattgcatttctagaacaaactcacttggtcatgctttctatttgctaatattttatttacataatttaaaatctagattataagtgagtctcataagaaaatctgtagttttctttgttagggctatctccgtcaggctttggaatcagcgttatgctggctttgaacagatacatgtgtaagtttccttactttgctctggaatatttcagagggcacagagttttatttcctgaagaattaaaagaatttgcctataaaactgttagggcatgctgctttgagcagcatgaggagtagctgataattagtttctcaaattttttctttggttatcagtctatgtaatttcctatattcttctcctaagtcaaattttgttacgtatattcaaaatatttgtcataaaaatatatttctattttctccctataaagcaataggcagccatgtgtctacttacagtgggatcggtccagagagagcatcttgaacactcctggcaaggggctcctggtgagcggggatgttggcagaaatggtcatatccattaatagaaactcgacagaggtagcacatctgggcaccacagcggcaagacatgcggttgcagccttcagatttgatgaggccagtcccacacttgtggcattttctaatgcgggcagcagtcattttttcttcactgaaataagaaaacataatttggagctgggagggaagatgaggaggaaaaaaatatggccattaagcatttatttattttcacataaaatgatcacttatggcttttttgtgacattaaacagtgaaaagagcctaggttttggagtctgagaactgcttcaaagttttaattgtatgaccttcagtaaattactcacctgcctggagactcagtttcctcatttttaaactgtgaaaacacaactttctcatggtgttttgagaattacagacaaaatataaagtaccctggcatagtgcccagtactcagcatttagaaaaggactgctctatttgttataggaatccctgtaggcttaaaatggagagaacaggctgagcatggtggtgcacgcctgtaatcccagaactttgagaggccaaagcaggaagatcatttgagctcaggagtttgagaccagcctgaccaacatggtgaaactgtctctactaaaaatacaaaaatttgccaggcgtggtagtgcacacctgtaatcccagctacttgggaggttgaggcaggagaatcgcttaaacccgggaggtgaaggctgcagtgagctgagaccgtgtcactgcaccccagcctatgtaacagagtgagactctatcttaaaaaaaaaaaaagaaaaaaaaaaagaaagaaagaaaacattgtcaaggagatgaggtttagataaagtgcatttagtactattaccttaatgagtcacctctgtagtacatccgtttatgattttagttactcagcaactgtgaagacactactcaacgttctacaactcaaggttctgttttgtttttttttttttgagacagagtcttgctctgtcacctagcctggggcacagtggctccatctcagctcactgcaacctccgcctccccgggttcaagagattctcccacttcagtctcccaagtagctgggattacaggcgcccaccaccatgcccagctaagttttgtatttttagtagaaatggggtttcaccatgttggccaggctggtctggaactcccgacctcaggtgatccacctgcctcggcctcccaaaagtgctgggattacaagtgtgagccactgtgcctggcctattttttttgagactcactgcaacctccatttcctgggttcaaacggttcacatgtctcagcttcccaagtagctggcatcacaggtgtgtgccaccacatcaccacacctggctttcatgcccggccattttttgtatttttagtagagatgaggtttcaccatgttggccaggctggtctcaaactcctaacctcaagtgatccgcctgcctcagcctcccaaagtgctgagattacaagcgtgagccactgcgcccagctagactcaaggttctaatgaaaaacttttcaatttgaaaagctatgtgcccaaacacaactgcaattttctacagcacaaaccttctctgtaagagcaccctgaggctgaggtgcggctttaaggtgtggcactccagttgcctggggctggctgactttccctgggaagctgctcaaggagagaagaggctgtaaagaattaaggttacagtcttttcatgaaggcttggaaagagggtctatttgcttgctcatccgatctgtctggcactgacatgaaataataatgggtatggagggagaaaaaaaggctctcctaaaatggacagaggaatacataaagcatgcctgcaactcaacattgctgaaatgttaaacagctattcaatattgctgaaatgttaaacagctattcaatattgcacaaatgtccactcaagtcctttgcttctgcatttgtaagagtagtactggatagggccagaatggagttttattatgggatgtggtgactacctagccagtaatataaaagtgaaaaatggggaaaaatcatggttgattccttcagaggaaaggtggtttggcaactagattctcaaccaggcaggaaacacagccccgcaggatgtgctcccggggcaggacaggaagagaagccggagctgtgactgtggttgctgaccttgcgctcacacaggaaggctcagggcctcttctatgcagccagcgacagcccagactcctgtagttatctgtgctcaccaccagccagtgtgtgggtaactcctctctgggagccatattctgatggtggcataagccatgcccttcagatctcagcccgtcccctttgtgagcgtgaagatgcatgtgtgtatgcattcttttgctgtggtaaaatgcacataaaattgactttttaaaccactctaacgtatacaattcagggatattttgagtattcacgatgttatacaatcaacatcactatctagttccaagagacttttataaccccaaaaggaaaccctgtacccactaagcaggcattccccattcctccttgccctgcaacccacagcgtgcttttgggctctacagattgccattctgaggctaggcaaatgcccatatgcctctgatatttcataggaatggaaatcacacgtgtgtttttgtgccttttttcacttagtgtgttgttttctaggttcacctatgttgtagcatgtatcgatacttcattcctttttatggttggataatattccattgtatgaatatatcatattagtttattcatgagttgatggattgagttttttttgctttttggctggtgtgaattgtggttaaatgaacattcttgcacaagttttatatggacacttgttttcacttatgttgggtgagtacctgagagcggaactgctgggtcatatggtaattctatgtttaacttattggggaaagccaactgttaactatggcggctacactatttctattcccacctcaatgtatactggtgtcattttttctatatctctgtcaagacttgttattttccatcgctttcattatagtcatcctaataggtgtgaagcggtatcttattatagttctgatttgtatttctgtaatgactaatgacgttcagcatgctttcatgtgcttgttggtcatttgtacatctttctggagaaatatcaattgatattgtttgcccattttttttttttgagacagagtctcactctgtcatccaggctggagtgcagtagtgtaatatcagctcactgcaacttccgcctcctgggctcaagtgatttcccacctcagcctcctgagtagctggaaatacaggcttacaccaccatgcccagttaatttttaaattttttgtagagactgggtttcaccatgttgtccaggctggtcttaaactcctgggcttaagctatctgcccgaccttggcctctcaaagtgttgggattacatgcatgagccactgtgcctggctgtttgcctattttctttttttctttttttttttttttgaaacggagtcttgctctgttgcccaggctggagtgcagtggtgtgatcttggctcactgcaacctccacctcctgggttcaagagattctccagccttagcctcctgagcagctgggactacaggcacgtgccaccacgcctggctaatttttgcatttttaggcgtttcatcatattggccagggtcatctcgaactcctgatctcgtgatccacctgcctcagcctcccaaagtactgggattacaggcatgagccaccgtgccccgcctgtttgcctattttctgattaggctgttctcttactgctttcaagattttctatgtctttggtcttgaacagtttgactctgatgtgtcgtggtgtggacttctttgagttcatcctacttggaattcattcagcttcttggatgtatagactcttgttcttcatcagatttgggaagttttcagccattatttcttcaatattctttctgttcattttgctctctgctcttctttgggcttccccttaatgtgaatattggtacatcagatgatgttctacaggtcccttaggctctattcacttttcttcattcatttttctttctgctcctcctccaactgcataatttcaacagccgtatcttcaagatctctgattcttctgcctgctcaaatctgctattgaattcttctagtgtatttttcatctcagctattgtaattttggggtacagaatttctgttggtttcttaatttttcttttttttttttgcaacagagtcttgctctgtccccacgctggtgtgcagtggtgcagtctcagctcactgcaacctccatctgccgggttcaaatgattctcctgcttcagccttccaagtagctgggactacaggcgcccgccaccacatccagctaatttttgtgtttttagtagagaaaggtttcaccatgttggccaggctggtcttgaactcctgacctcaagtgatccgcccacgtcagcctcccaaagtgctgggattacaggcgtgagccactgcgcctggctggtttcttaatttctatctatactctctacttgttcatacactgtgctcctggtttcctttagttctttgcccatggtttcacctggctttctgagcatatttaagacagctgattcaaagcatttgtttagtatgcccaatgtgtcctcagagatggtttctatcaactacttttttccctgtgaatgggccatactttcctgtttgctttataaattattgttgaaaactgggtgttttgaatattatactgagaagagtctagaaatcaggttgctttttgtatggtttgagattgtttagtgacttttaaaaattatttttgtaaattagccgggcatggtggtgcatgcttgtagtcccagcaactcgtgaggctgaggcatgagaatcgcttgggcccagaggtggaggttgcagtgagctgagatcgcatcattgccactgcactccagacggggtgacaaggcgagactccatcccaaaacaaaacaaaacaaaacaaaaggaaaaaaaaagggggccaggtgccgtggctcacacctgtaatcccagcaccttgggaggcagaggcgggcagataatgaggtccggagatcgagactatcctggctaacacggtgaaaccccatctatgctaaaaatacaaaaaattagctgggtgtggtggcacacaactgtagtcccagccactcaggaggctgaggcaggagaatcgcttgaacctgggaggcggaggttgcagtgagccaagattgcaccactgcactccagcctggcgacagagcgagactccatcttaaaaaaaaaaaaaagaaagttatttttgtaaagactattccttgttatgtgtggtcactgaagtctctgttgtattagcttagtggtcaatgccaggaaaaaaaaaaaatgaaagaaccaatcctcccatcctgatctttgcagttggagtactctgagttgactcagccaggtcatctgtaactttcttagtttttgagttcctgttaatacagaacctaaagctcagtgtgaggtgaaagcctagggtcttgggtttttctgagcatgtgttgagccctagacatgtacgtagtcttctagatctgtcttggcttgcccatgtgttactcattgcctcaggcagctgcagctggtacatgcctccaaatgctttcaacacaatccactgggaggctgtttcagccctgaggaagttgtgaaaggtgaaaaaaaaaaagggaaaaagttgcctctggcagtttttgccaggttaattcttgctctggtgggagataggagtttttggaattccctacactgtcatgtttttgtaatgtcactcccttgagtgtattttttgagaagaactaaagtttggtgaacaatgcagctgacttgccatgtccacatctgaaaccttcattttctttctttctttttttttttttttttttttttgagatagggtcttgctctgttgttcaggctggagtacacttgtacaatcatggcttactgcggcctcgaactcctgggttcaagggatcctcctgcctcagcctcccaagtagctgggactacaggcacgtgccaccatgcctggctaatttttagattttctgtacagagagggtctcactttgttgcccaggctggtcttcaactcctgggttcaagcaatccttccgccttggcctcccaaagtgctgggattaccggtgtggcagccattcattttcctatacttaatctctcccactcctggttctttgggttagctcgtatagttttatcacccaagctagaagcctgagaatcattctagactccttccgctcttacttcccgtatctatcagctaccaagacctgttgattttacatcttaaatatttcttaaatttatcccctcttctccatttataatactacaaacctatattggagccctatgatagagtggcttagactactgtaatggccttctaaattttctcctttattcaagtcttgctttctttaaagctacttgccctgtagccaccaaaatcatgtaacttaggccatgacattcatttgcttagaagtatttcatggtgggccacccagacactgcatagctctgggtgttttgtaatttgagatgcacagagccacctgtgaaatgttctcaccaaaaacctttgagtgagaacctaatcaagcctttagctctattttttttttttcttgagatggagttttgctcttcttgctcaggctggagtgcaatggcgtgatctcggctcaccataacctctgccccataggttcaagtgattctcttgcctcagcctcctgagtagctggcattacaggcatgcaccaccatgcctgggtaattttgtatttttagtagagacagaggtttctccatgttggtcaggctagtctcgaactcccgacctcaggtgatccgcctgcctcagcctcccaaagtgctggggttacaggcgtgagccactgtgcctgattagatctaaattttaatttatagaaaattgaagggacaggccaggcacggtggctcacacctgtaatcccagcactgtgggaggccaaggcaggcggatcatgaggtcaggagatcgagaccatcctggttaacacggtgaaaccccgtctctactaaaaatacaaaaaaaaattagccaggcatggtggcgggcactcatagtcccagctactcgggaggctgaggcaggagaacggtgtgaacctgggaggcagagcttgcagtgagccgagatagcgccactgcattccagcctgggtgacagagtgagactctgtctcaaaaaaaaaaaaaagaaaagaaaaaaagaaaacgcaggggacagaagaacaagttaaatgataccacgagaaaccagccaactctagaagacattctacaggccaattatcaaatgcaatgaatctcatttggatcctaacctgaacaaactaactgcagtacacatgtaaagctaatttgagataattagtggaactgtgaagttggtatgagatatcaaagacttaaaatttcaattttagttttgttagtggtcataaaggtaagtgctatataagaaaaaaaggttttatgggtgaaatgacatgctgtcagggatttggatttgcttgaaaacactatagcagtttaaaaacaagaaagtgacggccgggcgggcgcggtggctcacgcctgtaatcccagtactttgggaggctgaggtggggggatcacttgaggtcaggagttcgagaccagcttggccaaccacggccgacaaagtaaaaccccatctctactaaaaatccaaaaattagctgggcgtggtagcaggcgcctgtaatcccagctactcgggaggctgaggcagtagagtcgcttgaacctgggaggcggaggtcgcaatgacccgaggcactctaacctaggtgacagacggagactccgtctccaaaggaaaaaaaaaaaagacagaaagaaagggagggaggatcactcaagctcaggaggtcaaggctaaggttagctgtgattgtgccattgtattccagcctggatgacagaataagacactgtctcaaggcgagaaaaaaaacgttttgacatctggcaggattctgttgctctttggtcccagaggggctatatgataaggaaaggcaagttgaagcccgtggagcaccctctctctaaaaaaaaaaacacatcaccagattcctttgggcatcttctagactggcaccaccatcaaagacttctaagatgcagaggcgatgattctttcacatctctttttacttctcatttggcttgtacagaagaatggctcttggaggacagtgtattactttaagcctcaacagatgctgactaaatgtggctgctgttttagatgtcatctctcaccagaacaaacagcccctggcaactggtatgctgcgaatgatttggaaaatgcttttcctgtctgttcgataatcagagaacaccagcagccagtgaggaccttgattatgtcgttcaataggataacacaccgttctacttgaacgacatgcagatagaacctggtgaacaggaagtagcagttatggtagtatgtattaatatgctacatgaatgccagaaggttagagagagaaatcccttgaatgtaggaatgtgtcatctctatgaagttctggtggtctggaggtcaggcatgtatatcatgatatcccttccaaagctaggctcatgacagaagcatcctctatcactaaggaagaagcccaacatttgggaggctgtttttgatttttggaatcaacatatatcacatttggatgttctgctcttatccacttactgctgatctaaaaggctgccaggtttaaataggacccagtggtgggctatgtgtggcagaccaagacgctgagcggaaccagtgccaggaaccgataggacaatcagaatgaaggctgtgctttgtaagtaattctccttccaagaaacatctcacagcctgctactgagtcctgtagtagtccagatgccttatcacagggctgcattccctcctggaggcctgaggagagagtatgtttgctgctcatttgggttgtctgcagaattcagttgaggttgtaggaccggggtctctattttcttggtggctgtcagctgagggttttcccaacttctacaggctacctcaatccttggctcatggccaccttcatccatcttcaaagccagcaacaggggggtcaagtccttctcacgtttgtttgactcttcgtcccacactaaggactttctgcttttaaggatttgtaattagactgggtctactcggataatccagataacctccccatctcaaggtccttaaccatacaaccaagggcaaatcacatgggcctcagccgcctcatctgtaagagaataatggtacccacctgtgctgcatacttgggaaactgcccaaattgccattgcccacttcattttctgagtaccaaactccttccatatccttcatatttaaactggacataaagtcacccaactacaggctacatacggtgcttgccttgcccacgtgacaatctagaccaatgcgatacgagcggaagtgagatatatgtatataattcctgtatcacttataacataaagaaaagctgcctgcttggcaagttgtctatttcccactttctttgggtttgagtgtaaatgtggccacaatctagttacaatcatgcagaagagaatatcaccttcagggaagggtgaagcagttagacaatcttctcttttttttttttgagttggagtctcgctctgtcgcccaggctgtagtgttgtagtggtgcgattttggctcactgcaacctctgcctccctggttcaagcaattctcttgccttagcctcccaagtagctgggactacaggtgcgtgcccaccactcctggataattttattttttattttttgtagagatgaggttttaccatattgcccaggctggtctcaaattcgtgagctcaagcgatctacctgccttagcctcccaaaatgccaggattacaggcctgagctaccctgcccggctgtgagacaatctctgaataacgtcaggagatagatatgcaccctcagctgcatggtaaggctagattgttatgagagaagagaaagagatttcagtattacttcggtcattgcattctttttttctttttttttttgagacggagtctcgctctgttggcaggctggagtgcactggcgcaatcttggctcactgcaacctccgcctcccgggttcaactaattatcctgcctcagcctcccgagtagctgggattacaggcaagcgccaccatacccagctaatttttgtacttttagtagagatggggtttcaccatgttggccaggatggtctcaatctcctgacctcgtgatccgccagcctcggcctcccaaagtgctgggattacaggcgtgagccactgcgcctggcctgcattttaataagtgagtatttgtaatgtgctcagccacacagtactatacaagtaatggttattattatcacaggcgtatcattttgtattctggaggtgggcaattctacttaggtctcaggccaacagtttcctataacacagacataagcaacactagtgcagtctaagttaattaaaacgcgttacttgcttatttagaaaataaggaaaagggggaccatcatttattgaattcacaggtgccaggcatttatatgttagtttgtcttctgaaataactccatgaggctgcagagatgaggaaacagaggctcaagggttagattacttccccaagatcactccagactggggtggctcaagcgtgttcttccgacaacagtatgccctctctaccaaaaagcaggttaatggggaagttgagaatcagcccatagcccctctgaattctgttactcacatagaggtacggtacttgatgtcgtctttttcagccagctcttcacaggtgaggccattatgttctttccagagtccctgacacttcctacaggtttcctggggataaaggacagacacaaagacaactcctggtgagtggacaccacagaagttcctgttcaacaaaagggatatgaaatgagctttacttggcttgaattctttcagaggatgcctctccttttcaggggggatatttctaaagacatcttttaatagaagaggttaagaggtggtagggctaggtggctgacgcctgtagtaccagcactttggaaggctgtggcaggccaggagtttgagaccagcctgggcaacagagtgagaccctgtcccttaaaaaaaagacaaagagttgggggaggagaggggagtggtaagaatcattagaaggacgcacaaggaaaaatttctctccctagatcaaaaggaagtgttgctcccatcacttaatttgcataagcctttctaaaatgctctgggccatctgaaaaaaccaaaggagacggatcttgggtaatcttgggtttttaaaacacagtagcacgagctgcttggcagggcctgtttggatctcgttaatctctgcaaaatccctgtgcccacaagctggcgtccaaaactcgcttctactggattgaagaatggcctacttcagttcaccaggggctcctaagggagactttcctccgttgctcatcactcatcggcatggatgtcacccttaaaagtttcacttcatatataaacatgcatcttaaataatcaccacctttattctaggatccttcatagtttataaaatgctttcatatgtgccagaaactatcccacatcagtaagaataatttaaagagccaggcgcggtggctcacacctgtaatcccaggaatttgggaggccgaggtgggcggatcacgaggtcatgaggtcaggagattgaaaccatcctggctaacacggtgaaaccctgtctctactaaaaatacaaaaaaaaattagctgggcgtggtggcaggcgcctgtagtcccagccactcaggaggctgaagcaggagaaaggcgtgaacccgggaggcggagcttgcagtgagccgagatcgcgccactgcactccagcctgggcgacagagcaagactctgtctcaaaaaaaaaaaaaaaaaaaaaaaagaattaaaaaaaaatgttaatccaatgatcacaggcattaaatggaaattataaccctaataggttacagtgaaggaaaacatagtgttgtcagttttaagtggggccctgatctagtctggggagacagtgaaggcttgaggaagtgaggcctgagatccaaaggacgagtcaacgatgaatagggcggcgaaaacagatcaacactccagacaatgggcagcaagagaagactctggcaggcaaagccgggcatgttcagttcctatggctggactgcagacagtaagcatggccctggaggcctgcacgcaccagaccaggcaaggccttgaagggcatgatgagcagttttttctttatcctatgagcactaggaagcccccaaaaggtgccaagtacggaagtaacacgatcaggtatgtcttttaaaaaaaatcattctgggtggaaaacactggagggaggaaagagtgaacgtgcaaaagacagaagctagtaaagccactcaggagagaggccatgaaggcccagacaagggtggtgggcaaggacaggtagaaaaggggactgacttgagagcaagggaggaagtaagactggtgggtgtagagatgagtcgccgtgcctggcccttttgtacattctgaattttatactatatgtgtactatctaataaaaagaatttaaaaagggagaaaaatggaacagaatgctgagggagctgagaacctgacccttctggtgggatgtcgtaaaaagcctcaatcagggtgggcatggtggctcacacctacaggtgcctcattccagcactttgggaggccaaggcaggcaaatcatttgaggtcagaagttcgagaccagcctggctaacatggcgaaaccccacctctaataaaaatacaaaaattagttgggcgtggtagctggtgactgtaatcccagctacttgggaggctgaggcaggagaatcacttgaacctggcaggtggaggctgcagtgggcagagatggcaccactgcactttagcctgggaaatacagccagactccgcctcaaaaaaaaaaaaaaaaaaaaaaaaaaaggctcaatcaatgggctagggtgggtggggcagagaggagctgacaggacatacatttaaacgcactgcttccgagggatgcggatatgctctgttccctcacctacatcccattcagtaaacaaaggtgatatatattagggtgcctaactattacccaccgaaacatacagcagcacaaacccatttttataagaaacaaaccctgtgcctgactattgcaggaagctggaggacaaacaacagctggagaatagatgagctgatgtttggctcctaacctctaaaacaatgccaacccagccccttccaggagtaacagcttgaaaacaatacatggcatttagatactttttagcattcctggcaattccgttattaattcatgggtcttcctcataagggaagaaaccccatttttgagatgaggcacaggcccaccagggcaaaatgacctggccaggctggagccaggtgcatgtgagggccactgtgaggccctctgctctgctcaccctctacgtcacagtgcttcttctgtaggtgaacgtgtgggttttcagccagggcgcttcttactgaagggcccgagggtcccggagaacatatctgaaacgtcttttgaaaagactgtagcactttgggaggccgaggcggagggatcacctgaggtcagacattagagaccagcctggccaacacggagaaaccccatctctactaaaaatacaaaaattagctggacgtggtggcaaatgcctgtaatcccagctgaggcaatccctgtgaggctgaggcaggagaattgcttgaacctggggggcggaggttgcagtgagcagagatcgcaccactgcactccagcctgggcaacagagcaagactccatctcaaaaaaaggggggacaaaaaaagacaagaccagaccatgtagctagatatgaaacccacaattaaaataaggcaagcaaacaccaggctggggagtttaacatttggagctctctctgtgtagtgtctttaaaatgtactctctcttctaaacagtgtaaattttactaaattgtaattttctcctctcaggcacagctaggctttgctcctaaactcagcaaatgcttacgcatattacgaagaaacgctcttgaatggtttttttttgagccagggtctcactctgtcaccctggctggagtgctgtagtgtgatctcggcttactgcaacctccacctcctgggctcaagcgatctcccacctcagcctcctgggtagctgagactaccagtgatcatgcctgtaatcccagcactttggaaggctgaggggagcggattacctgaggtcaggagtttgagaccagcctgggcaacatggtcaaaccccatctctactaaaaatacaaaaattagccgggcatggtggcgggcttctgtaatcccagctactctggaagctgagacaggagaattgcttgaacccaggaggtggaggttgcattgagctgagatggtgccactgcactccagcctgggcggcagagcaagattcagtcacaaacaaacaaacaaagtgctgggattacaggtgtgagccactgcgcccagactcttgcatgtttaacatgataaccacattcttcaatctgtggtttacaagaaagccccaaagggccattttggaaggcaaagtacactttgacgagtaacctcaaaacatgaagaacagggtatcgtggccatcgcgcgggaccacactttctatccccttgtgcctttccgactgggggaaaccacggagttcaccgtcatcccaaatacagtaagcaggcaagcagctcccgccctctcaggggggaaggagcatgcatgctgggtagtttgttaacaagtagcccgccaggccacgttcttcacgtcatcatggaggttgctggttaagtttatgatgcccttttgtcctcaaaatacattaaggtgttttggctgttcatgaggtcttcactttgcaatataaagaaagcacttccgtcttcctttattcattttctgctgcctgaataatgattaatgaataaagcagaagattaaattcaattccagatgaccctatcatgatgggagctgaaatttcttcacataaacagctttctcaagaaccagtagacaaatgtatccggccaccacctcctccaagcccagcaagtgtgataataatcttgagacctttgggtctgttggcaaagaatccaaaagaaaatctgagcccacaggccaaagtcaccgggttctgtgtttgtttccttgccttccttgcaaagccacctggaaggtgtccgtccccatgcgtgctagatttcagttgctgacttccatccagccttgtctcagaagcagaacaaagtacaaactgctcccttacttttaaatggttcctacagtgaaacctgtcaactcactctctagggggagagaagtcactgacatgccacagggcattacgctgttgccaatccagaagtagcttcagaaatttcagctctctgttctgtcacctcaaaaaatggtgagactgggccgggtgcagtggctcacacctgtaatcccagcactttgggaggtggaggcaggtggatcacctgaggttgggagttcgagaccagcctgaccaacagggagaaaccccatctctactaaaaatacaaaattagctgggcgtggtggcgcatgcctataatcccagctactcaggaggctgaggcaggagaatagcttgaacccaggaggtagtggttgcggtgagccgaaatcttgccattgcactccagcctgggcaacaagagtgaaattctgtctaaaaaaaaaaaataataaaataaaatggtgagactataaatctccagcactcttgaggtaaaaggcccacacacttgactattcgcaaatgctcagccagggaccacaggaccgtgggcttccaggccatctgtgtcttctagttgtcaaagatgctggtcctccccacccatacgcccaaatgacatacagaaggccagaaagacactgattttaagatggaaccccttaaatctcaggagtttatgctgcaacccctgagaatcaataaagttcagcaaagtcaaagctcaggtagattcagtgaactttctttccttttactaagggaatccaagaacctctatttttcctaggtcaagaatgcacataacagccgaagaaggcttggtccttgccctcaaggagtgcactctactgagagagttacatatcggggcaaatcaagcacagcataatgggggttcagtgtaatgtgcacgcacacacggcaggggagcatgcatgtgcatgcagaggagaaagaggtgagtcagacaaggattctttgcggagctgacatcttcatgggattgactacagtaagtgccatgagtaatcagaacctccatgcaaccaataaagtgcttctcctactgggatctacgtcttagtgaaacgcttttccagcaatgacagccattaaagccaagtatctgaacctcagaaccagatgctcaaaccaaacattccaacaatgaaacatagttcaaaagattcctattttaataagcacaaagttttcatctcattaaataaaattattttgggccgggcacagtggctcatgcctgtagtctcagcactctgggaagccgatgtgggcagatcacgtaagcccaggagtttgagaccagcctggcaaacatagtgagaccccatctctacaaaaaatacaaaaatatagctggctgtggtggtatgtgcctgtagtctcagctacttgggaggctgagggggaggatttcttgagcctgggaggtggaggttgcagtgagctatgatcaagctactgcactccagtctgggtgacagagagagactgtctcaaaaaaaaaaaaaaaaaaaaatttttttaactgacttgaataaagcagtatattttaaagtatgatttatttcattacacccttttaaattttctgtatctgtgtatgttttgccatgttatgttacaacagtagcacacatgtaacgtacaaataaacacatacgctgggggtgtcctctgcacaatttttctgatacggcaagcaataaaattgtacatctgccgctctcaatactgaagcgccatggaggaggcctggagagtgcagcaatgtgtcggagttatgtttcagaatacttccattaattagtgagcttgagaccaaagacagaaagatggttgagaagcaactggaagagtctatgaaagagatgagggtgagagagaagcctagaaagacttctaggcttctgatgtaggacactagcgagattggtggaaacatgaacttagatcaagtggtgcagaataagatctgagtgacggtgggaggcagaggcgagtttagttccagaccagcttacttattcactcatttatgtgctcttccagtatctgctgaatttctgtcatttgtatgagacaccggagatacagcaataaacaagttaggctcagtttctatcttcatgacatttacgttttactgaaaaacacagatattaactgacactaggggcctagtcagaggatgcgacatttaagctgagtcctaaaggaggagtcggccaggtatgggtacagagggaagagcaagggtgaaggcttcagggcaggagagggtccgtctcatgctgagaaagtcagtatggctggagcccagtgggggagagtggagaatggaccatggtcacccagtaggactgaggctataggaaggagtttggaaagctaggctgaccaggtgggaaatgcaagcatctggttgacatttcaaaagattcttctggctgctactgttaaagggatggtttgctggggttgtaggaccttgcagcaccccctttctaaactaaggccaagtaaataacttctaggggaacaggctcggagtgtggatttgattcttgcttagatttcctcaacagtcctccataaataagggcacagcttacttcctgaaacaaggtgtgccaacaccaagcctggcaggggcaggaaaggctaacctgcgatggggcaatagcagcacacctgtactttttttgttaagaagaagagaaccacattttctgatatggcttcagaaagggactttattactattcttcttaatattttaattacattcattaatttttttttttttttttttagagacaaggtcttgctctgttgcccaggctggagtgcagtggtgccattatagctcactataaccttgacctcctgggtgcaagcaattctcccgcctctatcttccgagtagctcggactatgaacacgtgccaccacagctaaattttgttattttatttgtacagacaggtattgctatgtttcccagggtgctctcaaatttctgggctcaagcgatctgcccaccatggcctcccaaactgttgggattataaatatgagccacagagcccggccctgttttaaattctttttttttttttttttttttttttttttttttttttttttttttgagatggagtctcgctttgtcaccaggctagagtgcagtggcgcaatctcggctcactgcaagctctgcctcttgggttcaagtgattctcccacctcagcctctcgagtagatgggaatacaggcgcccgcgaccacacctggctaatttttctatttttagtagagacagggtttcaccatgtcggccaggatggtctccatctcttgacctggtgatccacccatctcggcctcccaaagtggtgggattacaggcatggagccctgttttaatgattgactgagacagggtctcactgtgtcacccaggttggagtgtagtggcacaatcttggctcactgcagtcgcgacctccctggctcaagcgatcctcccacctcagcctcccaagtagctgggaccacaggtgtgcaccaccatgcctggctaattttttgtagagatggggtcttgccatgttgcccaggctggtctcaaactcctggagtcaagcaatccgcaagcttcagcctcccaaagtgctgggattactgatgtgagccaccatgcctggcctggggaacatctttaacagaggtctaaaactcctgcttttcacagtactagctccatgctcctgaagccttaggtttttttttttttttttttttttttgaaacagcatctcgctttgtcacccaggctggagtaaattccgactcactgcaacctccgcctccagggttcaagattctcatgcctcagtctcccaagtagctggaattacaggtatgcaccaccatgcccggctaatttttgtatttttagtaaagacagggtttcgccacattgaccaggctggtcttgaattcctggcctcaagtgatctgcccacctcggcctcccaaagtgctgggattacaggcatgagccactgcgcccagcccctgcaggctgtttttcgaagggattgggtctcactctattgcccagtcagtggcgccagcatagctcatggcggtctcctcagtagcctgaacttacaggtgtgcgccaccatgcccagcttgtaggcttaggttttttgttaaagaaataaatgagacctgctaggactgaaaacttacacatcttcacaaagggtgctttgcatacacatctcaatcttcacagcaactctacagggaagtactggagaattattcccatttttaaaaaagtaaatacggctgggcatggtggttcactcttgtaatccaagcattttgggaggccgagtagggtggatcacttaaggtcaggagtttgagaccagcctggccaacatggtgacatctcgtctctacaaaaaatacaaaaattagccaggcgtggtggtgcaagtctataatcccagctacttgggaggctgaggcatgagaatcgttcgaacctgggaggcagaggttgcagtgagctgagattgtgccactacactccagcctgggcgagacaatgagactctgctcaaacaaaaacaaaaacaaaaaaggtaagagaaaaagaaggctcagagggtccaattaatttggtcgaggtcacagagctttagacatgagtctgtctgatcccaaatccacttgctcttactctagtcccactgtgtgcccacatggcgtttgctagcgaaagcaggtcactgtttactggagaacccaagggcacgtggctatgagacaagctgaggttacaatggcatcttgtgtgagaagaccacagaggaacaatcagcaaatctgggtgtgagcatcagggcatcaaaggcatggccgtgcagctgcagctgtgcaggatgtctgcttcctggagagctgcgaatggctcagtaagaggcaggatgggatggaatcagacctgaggataccctttcttactggtaacgataggaacctgctaatcacagggtgatctcagactggacacgtgtgaggaagtagctgttcctgccacctttgggcagttgcatgtctggcggtatagcaaaaggaagtccatttttagatttccattaccgcataaacagagataggctccatgaaagtgttccatagtcactccctcaaccagcccctggacgcttacttgtaaatacttgccacttacctcctcaaaggtggccaggatcagggcattaagatttggtaatggcattgcttgagattatcaccatcactgaaactgctctgggtcggttttgttcagagcaatgcaggtaacagagacagtttctgcactgaaaggaatgaagacactctcatgttcccacccttgccccttccaccagtgccactgagagccttccatcagtgccgctgagagccttccatcagtgccagagagagggatcggtataaaacgaagcccttgtcctcttagagtctactcacaaacagataactgtatactctgaggaagatggtgagtacctcagaggaaactaaagccaggtagggggcaggcagtgtgaacagggagggtgccatctgacactggtttgtcagggaaggcttgtgtagagctggcacttctgcttgagcctgaaggctatctggtagagaagcgttccaggtacagggaatgcaagcaggacagtagacggagctgggacaggacagagcgctcagagaatccagcacccacaccccctatgccctcaatggcacaacattttgcctaagaatatctcttctcctctggcaacacctactcaccagttctcctttcaaataccagtggcttgggaaacccaaatgacccgggaagagctggcacttgctcactgggctcccacagcacttagcttatgcgttgttactgcacttttagtggcgtcttgtaattatctgattatgtcacatcttttccaaatgccaggcgctccttgcggcaaagatgacgtcctgctggtcactatggacaggcttggcatggagggctcaattcatccaataaaaaaaagttcacttggccaggcatggtggcttacgcctgtaatcccagcactttgggaggccgaggcaggtggatcatgacgtcaggagatcgagaccatcctggctaacacggtgaaacccccgtctctactaaaaacacaaaaacaaattagccaggtgtggtggcgttcgcctgtagtcccagctactcgggaggctgaggcaggagaatggcctgaacccgggaggcggagcttgcagtgagctgagattgcgccactgcactccagtctgggcgacacagcgagactccacctcaggaaaaaaaaaaaaaaaaaaaaaagttcacttgaggccgggcacagtggttcgtgcctgtaatcgcagcactttgggaggctgaggcgggcaggtcacgaggtcaggagttcgagaccagcctggccaacatagtgaaccctgtctctactaaaaatacaaaaattagccgggtgtggtggcgcacgcctgtagtcccagctactcaggaggctgagacagaagaatcacttgaacccagaaggcagagggtgcaatgagccgagatcctgccactgtactccagcctgggcgacagagagggagtccgtctcaaaaaaacaaaacaaaacaaaaaaaccccaaaacaaaaaaaaagttcacttgagtgcctattctgtgccacatggagatgcgatggagatgaagcctggagaattcctgacctggaggggctcgtaatcaaccaccgtacatctcaggtatctttggatttctagggcctagcactagatttgagcggcacaaggtgctgaatgtctgagctggaggctggcaagacaaagcacatcttctccatgcagagagttgtttttttgtactttccatgggcaaaaaaagcgtatctatctcctctctgaaagaacattatttcctccctattgggtcttatttataattatgccaagtattttatgagaaaatgaaattattaatatatacgaccctttcaggttaattcattacagcttcagccttaaggatgagttactgtccttcctttctttgctccctaatgtctttccccaatttaatgagttaaactacaaacagcagttattaccaagcagctaatgaccaaatgcttgcagatggtgtgagaaagtactgcatatgtttcaattaggatgttctttgttgattttctcctgtagtttcaagacatggaagttgatctctcttcaatcaggataaaaggagctcacaaacagtagaccctgaaaatgtgtgcccaagagaacttctggtttagaggggtcaggactggaaatgcgcattctgcctgtgtcccagcctggctctccccaacacccccaggggctgtggaaggccagttgccgcccaagggtaggctgcacgcttcccccactggccagcattctcctctgcactcccagaaacaagataatccaaactgcctgggtccagttcttaaaggacacacaaaattcttttttttcttttttcttgagatgaagttttgctcttgttgcccaggctggagtgcaatggcacaatcttggctcaccgcaacctccacctcccaggttcaagcaattcttcctgccacagcctcccaagtagctgggattacaggcgcccgccaccaggcctggctaatttttgtattttttaggagagactgggtttcaccacgttggccaggctggtcttgaactcctgacctcaggtgatctgcccgcctcggcctcccaaagtgctgcgattacaggcacgaaccaccgcacccagccaggacacacaaaattctaacatgaattcttctaacagtgtcttgtaatgatctgattatgtcacatctaagaagccaagctcaccatgcaggggattcctctctatcctcaaagtacagtaaatcatctctcaaaggaaggagaacctttacatttccaaatgcagaaattcaaatctgggagtggccaagtgagagctctgggaaccattacaaagcctcccccacctcactccctagtcctgaggaaagggcttctttggggaagatttcatgttgttcttaaatattttttgttttcatacacacctcacctaccatttctatgtacagaaccaggctttgaaaaaagaaatcttgaagtgttatttctgtggattagaaaagttctttccctgagccaccaggattaggtgacaaattggaatagaagctttatatgtggtttctgtgctaatgctgccccctagggatggaaagttacaaggcaccgagacaccagcttgactgctctgggagagaccacacatagctgccggctttttactatactatggggaccagggcttcgaggacagagtgggagggtaaagtctttctggaataaatcaaagttcaattttatctttatcatagtaactacaaacaaaactaccaattcccttagttactcaaatacagacgactgtttctctcgaatggctgtttaacagaatcaccgagactatatcagcaacgcctaggcaatggcatcatgtggacatttatataaaaattccaagaccaaggccgggcgcggtagctcacatctgtaatcccagcactttgggaggccgagacaggcggatcccgaggtcaggagatcgagacgatcctggctaacacggtgaaaccccgtttctactaaaaatacaaaaaaattagccgggcgtggtggcgggcgcctgtagtcccagctactcgggaggctgaggcaggagaatggcgtgaacctgggaggcagagcttgcagtgagtggagatcacgccactgcactccagcctgggcgacagagtgagactccgtctcaaaaaaaaaaaaaaaaaaaatccgaaaccagtatgtgagctcctactaaggactatgggtcctgctctgcagtggggacacacattaagtgtaatatacagttaagacatgattgtaagtgctgaggagaaaaaaataaaggaagaatgcactggggtggagagggggaaatagttcacgattataaactggtggtcagggaaggcctctctgcgaaggtgcatgtaagtgaagacttaagaaaggcgagggagagagtctggtgctatctgggggaaagaattccaggcaccaggaacagggaggagcagggtgggcagagctgtaaggtggagaggagggttgggtttgcaggctgcctggggcctgagcccagagtaaacagatgctgaagaagagcctctgcaatggctgtgcatgaggttgattcccaaagaaccccacctgcagggatccctttcacggggagctctcaagccttctgagctgcgcctctgaaggtggggcctctcccgccttcctgccgagcttctcacagcctggaaagggcaggaggggaggctgtgactaagccccttccaaaggatttgctccccatagatgctccatacaatacaggttgtggaaccgaagttactacagcaatgacttttttttttttttttttgagacagggtctcattctgtcacccaggctggggtgcagtcagtggtgccatcatagctcactgggctcaagcctgggctcaagtgatcctgccccctcagtgcccagagtagctgtgaccacaggcacatgccaccatacctggctaattttttgtacagaccaggtcttgctatgttgctcagactggtctcaaactcctgggctcaaaggatgcacccgcctcggcctcccatatgctgggattacagttgtgaggcactgtgcctggccagccatgacttttaaactataaactgtggccctatggtgggttgtaaagtcacttcagtagattatgactagtggatttaaagttagaacaaaaatactagggcacattccatgtgtcaagtatttgttttataaaactgtttctgttccacctatatttatttatgtttggatgaagcttatggtaatttatatttcttactataggtcacaaacaaaaaagtttaaaagccattaatttagaattcattcagaattaaagtttctttaaaaaggcaccaaaaggctcattctcacaataggaagtcccaaggatcactgccaggaactgaaaaccagccccatctctagttaccctggaggtgactctgctgataaggaacaatgcccgggaaccaggggaaccccccagccttctccatcctgcaggagcagggccatgcataggaagcagatctaatcatttcaaactgtcaaatagaaacactgttatcacttgggcagaaacaagccaggctgaccttgtctttgctcactgcttgggctacctctgggcttcccagggttttgctgggaatcttggcctggcaggaacagccagcaaaaccagctcctgcctgctggaactccactgtcagcatgccctggaagagaggctgcagattccaggaagcctccttccaggtaggacaaagaccatcttgacactcctcctcatgcccaggctgacaacagctggacttaaagtcactggatcagattggggaaaggagccactggggtctgggcatgggatgggaaggaggaagtcgaggcttcatcctgagtcattcagcagaagtgctggttccagggtacagcgcagcttcaagctgagcaggtaacttcgcgttggtattttagggcgctgtgtaaagatggcagtaattcatgtatccagggacagaagaatacaaagctgtctgaacttggggttgacaatacccctttgtggatatcagacaggacatcttgcaaggtactgtttatatagcaggcatagaaaagcggctgcccctggtagtttttcacattctcataaaaatcaaatcccttctcagagtaaatagcaaagcggacttttttttttttttttgagatggagtctcgctccgttggccccggctggagtgcagtggcgcaatcttggctcactgcaagctccgcctcccaggttcacaccattctcctgcctcagcctcccgagtagttgggactataggcacccaccaccacgcccggctaatgttttgtatttttagtagagacggggtttcaccgtgttagccaggatggtcttgatttcctgacctcgtgatctgcccgcctcggcctcccaaagtgctgggattacagatgtgagccaccgtgccaggccacaaagcggacttttaatctttccctccttgctagtgaaatgtgacaaaaagggaagcctctcatggggacaggagatatgaactgaggatgagggtcaaaggagggaggaaaaaagggtcaactcgacacagaagaatgataaaaagtataggtgggagacacccagagtggagggctcagaagcagggccagagatcccagtcccgaggaagaacgctgttaggaagtagccggggtctgctgttgcctgcccttccagggcttcatgcccttcattctcctggttcacaagatttgggcgttctagtcacggtgtatcttccccatatctttactacgggaaatagtaaaacactatctagttagcatactatccacctgatgcctctagatgtgactactttcacaccttcactcatccccacagggctcttatccagccgaaatctagtcatctcccccaggaatatgagcaggagcataagtgatttttagttctgtggacctaatattataaagagcattagagagtatttcaacgcaggcaggtggctacagatggccccccttggtggaaactatcccacccagtcccgtgctatgcaggatgggcaggactgtctgcacctgccagcctgagaggaatatgggcggtcgggctccagctatacctactaagcagagttgcatctgacaagatctctgattccgacacatagtaaagttgagaagctctgacctcttttgatccaggtcttggttttgctgatcctctgatacctctatttagaaaagaaatgatgagatctttagaagaccaatctttgccactggcaatcacagggaggctgacacactcattatccattcttttcagtgtggctgaaaagactggcagagtttactcaatgcttatgaaatcatcactccatcttgcctcaagtgaaagattatattgacagatttagcagtaagagaccaaaagatgctagagagtgaggtgaggggtctgttcatgcttctaaatcaagacctaaactttgtatcaaatctgccagatatcactgttgaaactgagactgtgttggccaggtgcagtggttcacgcctgtaatcccagcactttgggaggccaaggtgggcggatcacttgaggtcaggagttttgagaccagcctggccaacatggcaaaaccccatctactaaaaatacaaaaattagtccgacatggtgttgtgcacttgtgatccaagctactcgggaggccgaggtaggagaattgctagaatctgggaggtggagataacatcgagctgagatcgcaccactgcactccagcctgggcaagactccatctcaaaaaaaaagaaagtaagtgagattgtggatggtgcgtttggaaatcctttttttttttttgagatggagtctcgctctgccacccatgctggagtgcagtggcgcgatcttggctcactgcaacctctgcctcccaagttcgagcaattctcctgtctcagcctcccgattagctgggattacaggcacgcaccaccatgcccagctatttatttatttatttatttttagtagagacggggcttcaccatgttggccaggctggtctcaaactcctgacctcaagtgaggcacccgcctcggcctcccaaagtgctggaattacaggcgtgagctaccgtgcctgccctggaaatcactttcataaacaacctggatgtgagactttcaggatccatttcctgcacatgcactgctcccctgagatgacacatgcctgaccacagtgctgctgcccgactgcagaggacccagccatgtgatagtgggctcctctgatgtgcatagaggggctgccaaaaggagacacccagaactagaggagagtgctgaactggtggttgggtaaaaaaagtcttttacttcctctttttgcttattcttggatttaaatttttggtacagttaatcatgtatgaaacaaaccttaggagattccatcatttcacagaaatgtttatgagcaagaaattaatggtatgcccctcaccattctgaccccaaagcatgcttaatctccacccctactgcttcattagtttcttcatgtccgacaacctaaggtgacctttggaagcaaaagtacagctaaggtggtgtaactgggtctcgtaacacagtatgttgaaatgtgacttccctctcatctttgttgagttgtgttttcagccttaatccatagcccaaattctcagttccagttatgtggcctacccgggaggaacttgtagtggtggccatataaggaggccgtctgtagcctttttcaggggtgagggtccaccctgggaaggcaggactcaaggtcttcccaagacgaaccaccatgcctctcccttccctaggaggcctagagtgttttctgtgaactgcttggttccgggggagctgccggagtggcagcctgctctgatgttgctaatatcatttgttatagcaacaaacgatacttttttctttacagaaactgctctaaataacacagatggacaacaggataaaacctcaccagaggcaatatgccttttgccaggctccctaagctgtgctctagttaggctcagcaactgctccatgtgcccatgtgaaggctggaaatcctgatgaacacagaggggacccagctgctcatgcctgaatagacttgcctttggctcatctctaagcccagtggtaactgttcctgctttctattgttttcccaactgaatcacacgtgctaaaaagacacatcatttatctgtggctgttatgaactgaactgtgtctccctcaaatgcatatgtgaagccctcaactctgacaccttggacaatgactgtatttggagacagggactttaaagaggtgattatattaaatgaggctgatggggtgagcgctattccaatctgatagccttataagaaggacagagagagccgggcacggtggctcacgcctgtaatcccagtactttgggaggccaaggcgggcggatcaagaggtcagcagttcgagaccagcctgaccaacatggtgaaacaccgtctctactaaaaatacaaaaaaatcagctgggcgcggtggcgggcacctgtaatcccagctatttggaaggctgaggcaggagaatctcttcaaactggaaggcggaggttgcagtgagccgagattgtgccactgcactctagcctgagcaaagagaccaaaactccgtctcaaaaaaaaaaaaaaaaaaaaaaaaggacagagagagacaccagaggagtgcacagaaaagaccatgtgaggacacagcacgaagacagtcctctgcaagccaaggagaggggcctcacaagaaacgaaatctgctgacaacttcatttcagatttctagctccaaaactgtaggaaaactgacagcatatataagcccctagtctggtattttgctaaggcagccgagctgaccaagacagtggccattgatgactatcaaggagtagatggcagtggatcagagaagttcccgcccctttgtgcacacgctgtgccctctgatcttcttcatacatgttggagacgttaagtcctgattctgggagacagatggaaagcaggctgtagagactgggactaagtcccagaaaaccaagaatgccaccgatttattttccatccagaagagcacatggcttcctggaagcagctgcccctaaatacatgtttactttgggggaatgataatcttgtagttatatcagttactttggtctttactaatgtttatataaaaggatcccactctgcaaaaacgccaagttggagagttatgtttgttaaatttaataacaagaagtgaagcaaccagactttagaatgaaactacacacacatgatgtagtgcttgtagcatcaagacaattcggagtttaacccactgatgaatttcaacaggagatggactttgaattgatgttctgagaataaaaagaggtttccagaattcataaaacacatgttgaattacatttttatccacttacatacattctcttgctggtacccgacgataaagactcatcgcataaatacttatgtgatcacataagcacactggtgctggtatggagcatgagtctggaacagagaaggccagtgaggaggctgctgtggtcttcctggtgagcagcgcaaggtagaggatggatatgagggaggactcaagataggatgctgtagagcactgggaggcgaggagctggggctttctaggacacagggacacaggcagcacactcccaggataatgctgaggagccctactggattctatcgtttgaccaagggggatgtcttgaaattggaaaatgtacaaaaaaagtactgagatgtcctggctacagctcaggatctgcggtttatagatgtattgtgtcttaacaagagacacggggcaggggcagggtgtatccatctctccatcgactcagggtggtgggggcctatgtgcacggtgtgggcattcccaccactctctggacctccggagaccaatgtgtcctctacaacaccaaatgccccacctgcgggcagtaccgcactggtcaccagcaccaccccaagcgggggaagtcagtggttattgagattcttctatgaagccacaaggtgtacagcatggcctctccccgcccacctatctaccctgcctgcttacggtaattagcgtggccctgtcagtggagctgctgttcaagaacaggctcgacagaatggagtgggctggagatagctctgtgggagaaagcatctacaagaacaggcaggcaggtgggggactggcctggtttgcgagaagagaagaaggggccagactaacaagagtgacaaaggctctagaagccactgcaggttccaactgggggtgatgtgaagaacagcaaagctgacctgtcacgtggggcagtatgcagggaagagagcaagttgcaggatcaagtgcaggaggccaagaccacagcccagaatgagggtctgcaaggaatttctccatttggctagatctggagaataaaacaccccatatcatcacagcaaataaaaatattaagcctgagcaacacagcatgaccttgtctctacaaaaaaattaaaaaattagctgggtgcagtggtgcgcacctgtaattccagcattttgggaggctgaggcaggaggatcacctgaacccaggagtttgagaccagcctaggaaagatagagagacctccatctctctctttctctcatttttttttttttttttttgagacagagtcttgctctatcgcccaggctggtgtgcactggcatgatctctgctcactgcaacatctgcctcttgggctcaagtaattctcctgcctcagcctctgagtggctgagattacaggtgtgcaccaccatgcctggataattttcaattttttttttttttacgacggagtcttgccttgtcgcccaggctggagtgcaatggcgttatctcggctcactgcaacctccgcctcctgggttcaaacgattctcctgcctcagcctcctgaatagctgggattataggcacccaccaccacgcccagctaatttttgtatttttagtagagacggggtttcaccatgttggtcaggctggtctcacactcctgacctcatgatccacccacctctgcctcccaaagtgttgggattacaagcgtaagccactgtgcctaattttcaaatttttagtacagatgggatttcaccacattggccatgctagtctcaaactcctgacctcatgatccgcctgcctcagcctcccaaagtgctaggattacaggagtgagccactgcacccagccctacatctcttaaaaaaaaaaaaaggccaggtgtggtggcacacacctgtagtcccagctaatcgggaggccaaggtgggaggatcacttaagcccaggaggtcgaggctgcagtgacctatgatcgcaccactgcactccagcctgggcaacagagactctgtttcaaaactaaacaaaacaaaacaaatgaaaaaagtcagctgggaattcctggggagactagtccaaaaagaggtgacactcactcatttatagttgtgcaaagcggggggtctttaaagcaaatgtggctctaggaggccgaggttggcagatcacctgagatcaggagttcaagaccagcctgaccaacatggcaaaaccccatctctactaaaaaatacaaaaattagctgggcatagtggcacgcacctgtaatcccagctactcgggaggctgaggcaagagaattgcttgaaccagggaggtggaggttgcagtgagctgagatcgcgccactgcactccagcctgggcgacagagagagactctgtctcaaaaaacaaacaaacaaacaatatatatatataaagcaaatgtcggtacagaatggcaactgctgaaaagccagcttcatatgtaactaaagcagagctcccacaatttaaaaggtgaattttttattttaaataatggcagggaacaatgtagtgattctggaacgctcaaataaggtaccaactactaacagtctgttgtatgctagttactatgctgggcacttcacagacatcacctcattcaattcttatccctctgcacacacgctaggttctgcacagacaagaattagaagccccagaggggacaggctttcctgggccatatcccaggggacaggggaggtgtgactttggcatggtgtagtggctcatgcctgtaaatcccagcactttggaacactgaggcaggaagatcacttgaggccaggagtttgagacaagcctggacaacaaagcaagacaccctctacgaaaaataaatttaaaaaaattagctgagtgtagtggtgcccacttacagtcccagctactcaggaggctgaggcagggggattgcttgagcccaggaggtcgggctgcagtgagctaggatcacatcactgcgctccagcctgggtgacagagcaagaccctctcaaaacaaacaaacaaacaaacaaacgaacaaaggagcaaggtcatgaagcctatagcgctaactctattcaaattcttttttttttttgaggtggagtttcgctcttgttgcccaggctgtaacgcaatggtgcgatctcagctcactgaaacctccgcctcctgggttcaagagattctcctgcctcagcctcctgagtagctgggattacaggcatgcaccaccatgcctggctaattttgtatttttagtagagacggggtttctctatgttggtcaggctggtcttgaactcctgacctcagatgatccgcccacctcagccttccaaagtgctgggattacaggcgtgagctactgcgcctggccctcttcttttttctttttttttttgagacagagtcttgctctgttgcccaggctagagtgcaacgcgatctcggctcactgtaaccttcgtctcccaggttcaagtgattctcgtctcagccttccaagtagctgggactacaggcatatgccaccaggcccggctaatttttttgtatttttaggagagatagggttttgccatgttggtcaggctgatcttgaactcctggtctcaagtgatcggcccgccttggcctcccaaagtgggaggcattgaccaccgcggccagcctcaagttctttccatgccaaagaaatttctttctctccagctatataccttataattttatgcaaacttttaacacaaaacaaagctgcccttaaaagtgctgacggcagttgcaaaaagtatgattctgaaccaagtcaagccccatctgtgagaactgtcgctggggaaccccaccgagctgcacctgcattgagtactcaggccaagccagtggcctctgcttcctcacagtctcccgtccgtcctgtctgcctggctgtgtgaccaacacagctctcatggggctcctggcacacaaaagatacctggacattagaggggcaccacaggggaatacacacacaattgggaggagcagcttccggctgaaaagtctgggccccctatgcccctattcttaaggaataatggcatttccggcctaacaactgggagagaaagaaaactcctaaacatacagtgcaacctgagccacgacacagaaaagccactggactcaggttccaagcacttcctctctggtcattgtcccaggctagattcaaggctggccctgggtctatgaccaggtgtgcatccagctggggcacttcaaaatgggaccagtgaacactggacataacctcatccaaggcccattatttcccatagggaagggttattgttccttaaaagccaaaccaaaccaaaacccaccaaccacatgaaacgaacctcgtaagagaactaactagtggcctgacctaagagaaataccactacagaccacatacatctcccttgtttttagggcactctgacgtatggtttacatagtgtggaaaacagaagtgatttcattttctaatggcattaattctaatttgtccaggtgttaattttagagcaaacacatgtgatttagagactgctcagcacgtgcttctgcaacatcagccaaggagtcgctatctgctgttgtcttttgcttctggatgttacatgctctactgtatgggtggtctgggcaatgccatctgcgttcactaaaggtgggcactaggtaaattatctccattgtaagactggactactaatcacagaaccatattcttttggttttcttgccattttctcaggctttcctctataaaaggaaaacaaaaaggaaaactagaagaaaaaatgaaataaaagatccaagccatatcgaaaggccacttatatggcttctggtaaattataataatggcaaacccttacaaagggaccatcctaagcactttgggcttaaccatttgtctgtcttttatatttgtgttagcatcctcagattggaaagaactgactaagaacaggtctggaattaccattcaatcgctatgagagtaggtgaatccccttccagtcctggcctgacctcattctccacttcctgtgcagagtcctgggagtgttgctcaggaaatcctaggaatcagagtctgcccaaggggaagggttgtctatgcagagaccattagagtaactaaatcagaatccagtagaatcaggggaaggaggatactggaatgtaagggagctagaaaaacagctctttgctctcttccaggttcctggtttacatacacagccccagccctgttattacacacccacactcttaactggagcagtaagaccacagtgatctttccagggggtaaccagattttgcgactgttcttggtattctaccttctcctacacacctgtcttcgtcttggtggtactgaggtttcctcccagttcagagatgtgcactccaatgcctgacgccccactgtggagccaaagggccccggctacataaatttgccaatactcaggcatgtgcccaaatctaggtttacttctgaggctctggggccctctgctgaccgcctgctgtaacttttagctcctcaccagaccaataagaaaaccagtctgaaaaatcttcccattttactgccatctacaagactttcaattatgttctctgagcttctgcaatgtcaatatattacctgcgtttcataaacaggatcagaagaatgttaaggctgacaggccctgggcagggaactaaccatcgccaaggactgacctacgttaccacctccccaagcgcagagaaaaatgagattcagagattcatgccacctggcgtccccacatgacctggtggtcaggaaaatggctctgggcccgcctgagtagtccaccatggctacttactaaagtgacctcaggtgagtgacctcacctctcccagcttcagcttccctatctataaaaggagtgcttataaggaggccggcactcgtagtgacaaatatcaactgctgctctgccatggctccagtcacaactgtgcctcctgggcctgctaccctccaagcacgcttccaggaaaccctgcactgtgagagctacagcagtgggacaagctgcagaggctgctcctcacacagaaggtgacggagcagatttctcgactccacttcatcagggaagacatgagagctggactggataaattaagaggcaaaggtctgcagacaagctgaggaggccgagctcctagagaggaagtggggagcatggctggtttatcagttgctctccaataaccctgatcacacagggactagaaatggcctcaatagagcaaagaggaaatttatgggagccacaagtgtagaatattttaaaagttattgagtaaagttgtaaaatttaagagtacagagattagatacagtggaatgaataacagcagcagctaccatttattgagtgcttatggatgaaacatcttagttatcaagtcatttaatcctcctaacagacttttcaggaggatcctgtcaccctcgggtaggggtggtggtggtgcggtggcgggggggcggtgcacacagctaacaagtggtgggacaggcatctgaacatggccatgctgctccagccagcccctgctaaaggcactggactaagggcctgtttgtcaccatctagtgacatattttgggcaaatccttcagccctagaatggtgcagaacagggcaagctgtggtccggccagcctcacaaggggctgggttgtgaggatgcaggcgctgagcgcactggtgcacacacaccgtaacaagtgtaacgaggctgttggtgagtctgggggaatgcggtgaagcctctcagcagtaggagtgctgaccagagtcccttgagggtcctccctgcctcacatttctggaagcctaagtgatcaccagatgtgcaattatttgataaggcttagctccaggcgctatgacaacagacacaaaatcaaaaccactgaaatcgagagaatagccctgtcatggaatctcccatggaatgtgctactgcaaggaacaattaaacaaaaaaagaaaggcaggcaccactgagagaagagcgtatctgtgtgagtgcctgcatttctaacaactggccctgtgggaatgagcatctttagaccctcagcaggagagactatcatgctcctccaggtccctcacccgcctttctgctaagcggccagagtccctgggcaggtgagccaggcggctccacagtcggctttaagaaacacaatagggaccctgtatgcacagcgagtcccttagggtcctgggagtctcttgctgggatcattacatcctcagtcctctgctaccagaataatcatgtgacaagctaaatctgatcatttcactaccctgtttaatgaccatggatagacttcctgctgcaatcaggaagaagtccacgttcttcacacaagggacatctcccccacgagctggccctgaagcttccagcctcctcagagctcgccctggaaacacacgctcccctctactttaacactctgtgtcctcttccggaagtctcttcatgctctaatgcagccttcaaggtccaacagggaagtggttcctttgtcccccgccctgcccccagctagctctgtcatcatagaatgcgatccactcccccaagcccaagtctcctacccgagtcctccacgtggtgggcttgtcagctcactggttactcaacacttctttttttgttgttgttgagacggagtcttgccctgtcgccagcctggagagcagtggtgcgatctcggctcactgcaatctctacctcccgggttcaagcgattcccctgcttcagcctcctgagtagctgggactacaggcgcgcaccaccatgctcagctaattttttttgtattttactagagacggggtttcaccatgttggccaggatggtctcgatctcctgaccttgtgatctgcccgactcggcctcccaaagtgctgggattacaggtgtgagccaccgcgcccagcactcaacacttctacttggatatctaaaaggcaccccagacaaaagatgtctgaagcaccacttctggcccctgggctcccctgtatccctgaaggacacagccacccactggctgctcatgcaacaaaacccaattcctcctttctctttacccccactcattccagcttgtcctttctgttccgcctccaaaatgcacctcacatctaacccactcctatctgggtccaaaacccagcctagatcccctctggctgggccatggcggagagcctggacttcaggccatcccacccctcactccctctcatgctgctgcctccagccataccccgcagataccccagacccttcccacactggggtctcagctcctgtgttcttacctcaacagcttgtccctggctctttgaacgcctagcctcttgcttataatttggacaagtcctgaatcgtttgtggttcttcagagacactgaagagccacctgggcctttagcagcaccctaaatgtttctcatactatgcctaatgtaggaacctccctacctcaggaaatccaagcaattacctagggccagaatctgaattatcatctggtttcatctcccatcatttacctgttttaggaaaaaatacaaactttattctgaaagagaaaagtcatccttggccccaaacacgtcacattttatagctacacagaaacaactgtggattaccaagtccccagcagcttctaagcttctgggaggaaatctgtagccctgacccagtgtgcctccctctctagtttattccaaggggtgttctcaagcctctagggctaggcaggacctgtagcaccaaggacagtgtcttcctcctccttgattaaccctacccactgaccacactgacaacctttcaatgttgttcttgcttaggaagtgtcaaggacgagtcccattcctcaactggggatagttttctgtctggtatgttggcccaagcctcactggttgcaacttaccagaccacactgcgaaaccacactgctcagcttcaacactccggcttactgactggccatggcatctcatcaacagccatccctcaatcctgactacataaacgggaaacacccagaaaaggaggataggaggtgaaaaggccaaattcaaaagcaagttcaacatgaagacgggatctgtgtagcccctaagggtggtaacccccagtggttttctaaagaatgctacaaagatgaccatctccctgtgccacagcaaccttagacaatgggtcacagcccactggcactctggctctgtgtgtgccacttctgtggccggctgctgcctcttctcagggtggggatgatggagaaatgcttgcagacctgtccactcagcagacacaggcacctgaggccatgcgggcccacgctgctaggaaaaaccgttggctttctttccccttttctaaattgcaaagttggcagattctgtacctacgtgccagcccacactgactttttctcaaatctagactccaaaaatccctatcttgttctgaaatcctttggaatcacctcagaggctacttgaccaggttaccctcacacccgtccctctaaaagggcagccatggagcacatgttactacttagcttggagcagccaatctctggcctaaaggagagatgacagttttactttcattttttttctttttttttttttttgagacagtctcactctgttgcccaggctgcagtgcagtggcgcggtcttgtcttactgcaacccctgcttcctgggttcaagcgattctcctgcctcagccacccgagtagctgggactacaggtgcccaccaccatgccgggctatttttgtatttttagtagagacagggtttcaacattttggccaggctgatcttgaactcctgacctcaaatgatccacccacctcagcctcccaaagggctgggatatcggcgtgagcctctgcgctcggctgacatttttacttttaaataagtagcatgtaatagagttagaataatcatgtgcaacacttttggaaagaaatttgaaactgtgctccaagagtcttaagcaaatggattctcttggaatcaagagtcctactctagggatctattctaaggaataattctaaaaaagaaaaagctttacatataaagctttgcattgcgttaatgtagcatcaaaaccagaaaaaaattctacatttccaactcaggagcaagcataggtaaaccaacataaatctgtgtgatggaatgacaacctcccatgacggggtcacaaactccttaagaatgcagaaagtgctatgtcatgctaagttaaaaaacaaaaaacaaaaccgcagggcacaacactgtatgtatgcaatgattataattatatggtaaaaacaaacaaacaaacaaaaaacagacaccagaccacaagctagaaatgcagcatcacatggtagaaggaatgaagacagggccagtggaatctatgtagcccttagcagctcctggcctctttgtttattcattaaaaaaaaaggggaaacaaaagaccttgctggattttgttttatttttaaagagacagggtctcttgtcacccaggctggagtgcagtggtacaatccacaagttggaggctcactgcagcttccaactctattttcctgcaacagtgcccagaggtgtctatatctaagtggtgctgccagactgctcaccacatcctgaggtgggtcccgtatcacccccatcctccatgtggagagaccaaggccacaggcacatagcatcatgacttaaccacctcatcagaactctctgaacaggtaagatgttctccaagttttgtgatgggagagaggtgccagttgcaatcctggctctacccctttgagtgcacacttaacctggagcctcagtgtcctcatcaaggagaatgaggacaatgtcagcaccttcctctcagggttactgtgaggattaggaattacaactgtttttaaagtgctcagcacagcagtagataatcaatgagccatacaattatcatcagtgtctatggataaaacctgttaaaagtgcaagataagcccagcagaatttacagcctagttgctatggccatcattacagaaaaaagataaacaccacatgaattctccagcctgcacagagaatagggacgggcatcacttgtgtctggtgagaaggctggctactgctaagttaagggcaagatccagtaggggtcttgtggcgggatgtgtgaagaccaaggcagcagcaagttgatttggtctggcagtatcaggtactggtctgtgatggtgggaccagtgtttccacaagctgggccttcttttttttttttttttttttttttttgagatggagtctcgctctgtcacccaggctggagtgcagtggcgtgatcttggctcactgcaagctccaccttccaggttcacgccattctcccacctcagcctccggagtagttaggactacaggcacccgccaccacgcccagctaatttttgtttttgtatttttagtagagacggggtttcactgtgttagccaggatggtctcgatctcctgacctcgtgacccacctgccttggcctcccaaagtcctgggattacaggtgcgagccactgcgcctggcccacaagctgggccttctaagccgagcctctgcattaaaacaaatgctgatctttaggctcctcttggagtttgtcagccctggcctattccaggaagcaccagctgctggcttctcctgggcctggccccatgcagttcgatgttccctggggttgctggaaatcaagtctggctgatgtcaggggcagtaaagcccatcccatgtagccacgtagctttcccagttccactcaggctgtggtggctgtcccttgctagtgagaaaaaggaacttgactgatacctgaacaacaccctagcagcaattccagtgggtgttcaagcaatgtcttcttcaaggcacctcacatatagttaggaaaaacaaaactttacctttacagagttctttcctctagtaaaccaaatgacatgcctcacatttttaaggtgatgaaaagagaggtcagtaaaattttccccaagaaggaaagggtgcttgggagtcctgcatggggggctgggggtggggtggggtgttagtctgtagctttgtcaccccacaggcttcaggatgtgcagggggtatcagatttgagcagtctttacacagcataggtggaggggtgaagagagtgcccaggattcttgctgatggtgagccacgctctggatgaaggcagcgtcttgcctgccctcaagccgccatcttgggtcctggtggctcactctttattctgcctctctacctcactggaggctcatggcctccagtgattgggctgcccatgtacaatgtccaccacggatgggtgggcatggaggtagctcccctggctgtggtagctggagacagtgagcacgaacaaaaccatctcctcctttttgctccagagcctcttgatctcctccatcttcagaattccatgaataaaacgtgattaatgtcaggaggcccctttctgggtccatgctctgttggcctgtgttctctcctcctccccacagaagccctgggatggaagccagggtgtaagggaggattgttgggagggcagggctatagaaattgttctgttactttccaagacactaagggatgcacactaaacattacaactttgaaaacagcaagctacacggtgaactacatcaaggcaaattctattactttttcctctttcctcagcaaactgaaaagacaaagcggtgagctaaaagtgagaggggagggggcatagtggaaaaggaagtaaaacaccagaagccaacctgacatcagtcctggtctcacctcctctgctctcaaactcccagccacatggcaagtcaccagcactgcagatgcccatctcagtagctaaatcaaattcatcttgggaaaagagctttaaatattcaaagccccattaatcctcatgccttgtaattaaatatgtatgttaagaaggctggacaaaagcaaaacattttcagtatgtgaattctttatatttggagcactataatgcatttctatgtactgaccttgtagaaaacgatgtaaaaaattccggccgggcgcggtggctcacacctgtaatcccagcagtttgggaggctgaggcggacggatcatctgaggtgaggagttcgagactagcatggccaacatggtgaaaccctgtctctactaaaaatgcaaaaattagccaggcgtggtgatgcacgtctgtaatcccagctattcgggaggctgaggcaggagaatcgcttgaatccagaaggcagaggttgcagtgagccgagatcatgctgctgcactccagcctgggttgacagagtatgactctgttattaaaaaaaaaaaaaaaaaaaaaaaatggagcgtgcttctccaaactctcaagaacaccactgctgccacgtggtttctgtgggggcttctgacacctctgtcaaagagcccttacctgttgcggcctcatttgcttctcacaaccaccctgaagggggctgggacagaaaacaggatccccatttctctgatgaggaaagtcagagtaaatgatgtgcggacagtcacacagtggtggcttaagagtctgaatgttatctgttctctggttaagtgctgcttaaccatcagtgcctttaggaaagctgaggcagggaagccaaatctgtacaatgcacgccagtgttcctaaactgatgttctaaattgtgaggctcacttagaactgcacttgtcaactatttctttaaatacatgtgagctgggtttggaagatttgtcaaacaagctttcaaaggtagcgctatttgcggcaatgacatattacctacagaagatcttaaaacagcggtccccaacatttttggtcctaggaaccagtttcgtggaagactatttttccacggacagggcgtggagagatggcttcaggcattagactctcataaggagtgtgcaactcagatcccttgcatgagcagttcacaacagggttcacgctcctgagactctaatgctgctgctgatctgacaggaggcagagctcaggtcgtaatgctcactcactggcccagtgctcacctcctgtgtggcctggggatggggactggggatccctatcttaaaagataaaagcagagccctgattattctaattggattcatcaccacagtcaagtgaatgttatagaaacaccaggttcaaaatcaaaatctagaaattaaaggaagaccaggtacggtggctcatgcctgtaatcccagcactctgggaggttgaggtgggcagatcacctgaggtcaggagtttgaggccagcctggccaacatggtgaaaccccatctctactaaaaatacaaaaataaactgggcatggtggcgggcgcctgtaatctcagctacttgggaggctgaggagggagaatcacttgaacctgggaggcggaggttgcagtgagctgagactgcgtcactgctccatcctgggcaacaagagtgaaactccacctcaaaaaaaaaaaaaaaaaaaagaaaaagaaaagaaaagaaagaaaagaaattaaggggacatgatgtgggattttcagaaaccaaagagtccactcacatctacttttggacaaagatactgtagaaagactctcatattggcacttgtggacctaaatgacatcttaagtttcttctagttctaaaaggctgtgacaagcctctctgcctgccccttgtgaaatcctgagattaacagatctcattacagaggaggaaaccaacacagagaaattaagtgcccccaaatgaccaggaaatcaagaatgacagaaatgccagtgtcttactttccaagcatctaaggaaggagaagataagtgaatccactagcatttccaaggacctaagtttaaaggtgctaagagttttgcaaacatcccctcctttaatcttcagacaacccagtgggtgaggcagagatcatgatctcaccattttacagatgaggaaaccaagtcacaaagagatacaaggaagattatgtaggtcgtgtccagaatcccggactgtcatgccacagttaacatcttgccatattcttttttctgttttccaggagggaaaaacagccgttttgacaattttcactttgcttgatggaaggaactagcgaccgcaaatggaaccgaagaggtaattagagcagtaaataagcagcagctattcctgctctatgtcctggattcccacagttggctggtggggacaccaggctttcacgcacagaactgtgtaaaactgaaagcatttcaaaaatgattagtcttctttcgattacttttatattgagagaaaaagcagagtagaaagctgttaaaatgtaactagacagtaaattgagccaaggtaaaacctgtacataaaaaaacagactcacatatctggaaatcataaacaaggggctgctctatttcagacaaaccgcatgtcaaaggaaattgcccagctacacctcttttctatcctaaagctttttaaaaaaatttaaatgttcgtatctctgttgacactagtgaaaagaagaacacatactgaatgtgctaagaaatacagaagttattataaacaaaaagcaaaaactcccctcttgtcaagccttcctgtagcagtttgtgtttcatgcttaggttttgaagaaaaaagttaaaggcgcatgtatttaccagctttatcctttacatttatacaaagtgagcagaaggctcactctgcgcaccttaccttgctttacacatctgacagtgtatcttctggagacttccttatccatacttattatcaggcttgtcttatttttttttggactgggatatctgtaaaactgtgggtgacttaggattgggcaattctcagtttatttagctttcttattagtgaaagagttgctcttaataatatgatacgaattcccaaatgatgataacagctactaacattactgtgcaaagcactgtgttcttcaatataaagtttaagtctgaactcaaatgttgactgaatgagagaagcgggaaaaatattcacaaaactaggtaaaggaaatactcctttttcttcaagtggatctgagaagcctggcatcttacttggttctgctgtggcttcctctctcataaaagaacaggctgccgattctgtgaaacaaaatgatatcctattatatggcaccaccatcagtgccttgtgagccaatatgcagaaccaaaagcacaggagggaggtggaagggggtcctggagtgcagcgctaagggtctggggaggtggatgcttgacgggggcaaagggcaggcctggctccagaagctgatatggcagcattttggctagtttgtgaggtataggaaaagtgacagaagttacgctcagtttttgtaaccatgactcactccaagactttctcaacaataaccatatttgtagtattaaaaaaaaaaaaaaaaagaaagaagaagaaaagtgaaaggcaaaacatccaaagccgaggaggcagggcgcctagaaacccacatcccttctgttgtcaagtgatcaataatttcccactttctggaggccattttctaaaaaaaaacaaaaaacaaaaaaccctaggcttgtagtcaagtagttttccttttctcttggacttcctacaagtttttaaagcataagaaatgtagttttagggctgtaattacatgatagacttgagtaaaatcatttagatatgcagagtttaataaatagtacaaaggccaggcatggtggctcacgcctgtaatcctagcactttggggaggccgaggcaggtggatcacctaaggttaggagttcaagacaagcctggcctgcgtggcaaaattccgtctctactaaaaatgcaaaaaaattagctgggtgttattccagccacttgggaggctgaggcaggagaatcacttgaatccaggaggcggggggttgcagtgagccaagattgcgccactgcattccagcctgggtgactctgtctcaaacaaaaaaaaaaaaagaacagaaaagagaagagaagaggagggcaggtaaccccccttatttgccgagttcacctgtattatattttacttacatctttaaaggttttatggccaggcgcggtgggtggctcatgcctgtaatcccagcactctgggaggcttaggcgggcggatcacctgaggtcaggagtttaagaccagcctggccatggtgaaaccctgtctctactaaaaatacaaaaaattagccaggcatggtggtgcacacctgtaatcccagctacttgggaggctgaggcaggagaatctcttgcacacaggaagcggaggttgcagtgagccaagatcgcgccattgcactctagcctgggcaacaagagtgaaattccatctcaaaaaaaaaaaaaaaagattttaaagatcctttttacttcctgtttctctaaaagcatggttagcaatgctcagaagctaggtcagttttggtgactgactgctttgttaaggtttcccaggtagtattaaagacctggaatctatcagctgctgccacagaatgaaattctcctctccctgcaccatctaccacttagaccaggggaggaggcgccaccttcacctcccctagaaacttcagcagctcccatcagcagtgctttccctgtacatctgcaagcatcacataaccctaaatagtaagcaggactggcactgttatcccattctacagaagagcaaacagaagtccacaaaggcagtgggaagtgcccagggctagtgagaggtagagtgaagatctcgcccttctctgctgatgctcctgcaatacagcccacactagagctcatgccccgacagcctgcagggatgtacacacgcatgttctgccaggacagctctgccacaccagcctgacacttaataacacatacgcacatgtgtaaaatgtacacattcatcatggaattgcgatttgggggctgaagacaacctacagatgagtcaacttggaccctgtggttcagggcttatccagcacacagccaggagaggctgaagctccacctccacacaccccctgcagcaccttttctgcctgtcgtctcttcccagctcacacagccgtgcaaagaactctgttctcacgggttgatctgccatgtttttaagttccgacagaagcacacccatttctctaaccgtgtgtgtagacggtgagcctgggtgatcaacgtgacagcacttctgctcatgccaacagggtgctctgccaggtctacccatggtgaaggggagacaagccacctgacacctcgccactcgggccgacggcagcatttgactgctaggacactgtcttgtgacccactttactcactgctccttacttctcagttataagcagtaattagtaatgtcagtgttcctgttctggctggattgctcctggctggattgctccaggcccattaatgatacaagagcaggaacagatgaatgcgtaagtgtacaagagaggtttcaaggttaaaggcagtaatggagagagctatggtgggggtggggaaggcagtgctggtgtgtgtagaagagaaggggagagggggaatgtgtgtgtgagaaaaacagagtatgtgtgttagttttaagtctattctttaaaatgcccagcttctccttaggggcaacatgtatggcaaagcacaacttcttagcgtcctcaatcaagtgaagtagaatcttctatctggcatggacacatggttctggccacccggcagggagtccatcagtactaactctagacaccggagagttactagtgtatgaaattgaggtcagaggaaactacaccaatatctttcaaacatattttcgatgttttaaataacttctcttacagaaggcaatgtctgcttgttcagcagaactgctaccttcccacttaatgcttttacagcggaagtcaagacaagtaatgaaagacagaccccaggggccgacagtcaggccctcctactctagtggaagagatacaatactttatattgttacaattgcctctgcatacctacaaatctccatgttttcaaggagggatttcaaaaggtataatttccgacattcctacccagagttttgctgaaaaatagaatgacagcaagtaagcccgcaaatcatgcctggaaaaggcttagcacggctatttgaaaaatatttgcttgggagctggaagagggaactatgaatcgaggctggcagccaaatgggaattttttagttgtttatatgtacactgccttctaagcagacaaggatttgccactaagccttttacttgttcctcacataccaaaagctaactgttacacatactaggaaagtaacaactttatttgctgatttcacaacccaaagcagacatttttaaaaagcggtcatagcaacgccgggtgaatcagaacccatccttgttagtcagacatactctgtgggaaaaggcagcagttggaaacagtcttgaattctaactactaaaagccatactaattcccgcggggccctgacttctggtccaaggtttctcactggctgtatcctgtccgacagtgccagagcttgtgctgcaagcagagcccgtgcagaaggcgagcgaggagaaaggcagagctgctcagttccagctccttccacacaccacaaaacgccatccctcgcctccagcccgaggcaaggcactcctttttaggtggtaaaataagccttccaacacaccagaagaaatagcttggagtttgaaaatacacaagcatattttaataatcacatttctatttttcaagttctcttaatacaaacaaaacaaaaattcttttgctcatgttcagacatgactaagttaatgacaatgggtatacaatgtgacacatgcacactcctcccttaacccttggtgagcatcctcaaaagcgattcactgctacccatttcttatctatccttccaaatagattttatgtctgtgtcagcaagcatctcttcctcctcccatttaagacacaattgtgggcatattgcacccattgttctacgtcttgcttttttcacttaatatcttggagacagctccatatttgcacaacgggattccacgtcattcttttaaacgctatggtatatgctacgggttggcaaactacagctcactggccaatctggccctctgccaatttttgtaaatataattatactgggacacagccacattcatttgtttacatattgtctgtggttactttcacgctataaaggcagagttaggtagctgggatagataccatatggtccgcaaagcctgaaatatttactaccttgccttttacagaaaaagtctgctgacccctggtatggatgtttacagaaaaagtctgctgaacctcagtatggatgctgaccccccggtatggacctccactgtactgaggtaccaaaatgtactgaaattgttccctgctgatgggtattgcattggatttccttaagaataaaattaaactcctttaatgctaagaagctccaagacatttgaggaaggaaagagcaggaactagctaggaagaagccggcatgaagaagccaagcttaaagagggaacttcagagcaagctacaacctccccaagtgtcaattcctctttttagaggaagtaagaagggaactgtaggtcttttgataagaggaaattcccctttgctatatcaaagctgctccctgtgcttgtgttgttctaaagttaggcaagactgcctgaagcatactgtgaccaaattaggaagcaagaaggctgatgtctctaaagctggtcacccatggccaggcagcccaggcatgcaaagacagagatggacgcgggtagagactctctggccaacaaggagatgctatttgcttaagaaatcagccttaaaaatgacacaacgaaaattaataactgttctataagatggaattcacttgctgttgttgaccaaaaaaacaaaggcttccaacatttccacaagcaaagaacatgagagaagcacagtgagacgaatgctcccaggcatcatgggtttattccaaaggcagtaaaggtcttggaaagtgccaaggaaattataccacttagctctttgatagatcaagatagtcagttttacactattgagaaaagaagaatccagaaaggtcttactaaaaagggcattttgtaaactttccattttaggacggcctactcaatttctttatttgctggaacagttttcaaacaagtctttcagcttcaaaacaaggtctaggtatgcagtacttgaatcattcacactgagcttgcttccgccactgctactcaatgatattctctttaaggaatgacttctgagttaacttttgattcagatccaatgagctcagaatctattctgaccacgagcactatctgggtaataacatttgaccttgaaatccctgctttcctccaaaacttccagatcagcaagattcttggacacaatttttattcccttggcaatgtgcttagttcagttccaacatctgctatgagatcagacagtcagaattaaggtaagtttaaacgacaaaacaaatctcagttcttgtttataggaaaaccttcaagggctccaagccaaaggatgaggcccacttgtggcgcaatttgaggacctgcctgccctggagcagagatgtgtatggtggccatgcccttcagcctatggaaagtacattctctgtagctgcgtagcttgtgttgggctggtctcctggtctgccagggtgcactgggcagaaattttacagccactctctcaaagtgttctaggtgttgtcaaaatagctaagcatttgtctactaactactcctgttttgattttgaacatttatttataatcatctaaaggacccaagcattttatagaaaagacaatatactttccaaagaccctggttaactgacatacaaatccaccaactaagaactgtatttctattagttaaggcttctgtggctcaactttaactgagccaaaaaatacactaatgggccaatggggacacagatgggttagggaactacccctgaacccaaagttcatatatagccaagaagttcaatgacttcaagctacacgaagttagcacttaacctatccacggttcttcatctgtacaacaagcatgtctgggttatatgacctcctgggtccggcttataaatctaacatctacaactgcaagtcaagagtaccaaataccaatatacaaaaccacctgcgcagacccagtgcagcaacttgtaccaaggtttgaaccacacattcacacgtccagcagccacagagacgaaaacgacacgccagcctgtcctgacctcacactccccagtctgagggcccggcagaagcgccacatcgccttcctctcctgttttttcttatggctgctgctgcctcggagcccggactaagcaaggctgttaggcacggggtgagcacggttgcgcctactgctgagagtgcctctccctgccggtctcctgctctctctctgcagagcagaagacaccgcagctatagacaagttctattgcccttttatggtagaaaaatgaattgcttgctagcagtggtgccgagagagatgacagaatggaaagttgtcatttgttgtggttttggcagccacagaatagtgttctcccctagtcatcctcggatggatggtgcacaccaggcattcacagagggaaaagcaaaacccctggtcaaactgttcccttatgtgttcttcccttgctttgcctgtaaacggatgtgtttatttatgaacagtgtcaagccccattgtggaaatgtactttttacaaaacaaggtatcaaaaggctgtttgtgttgcactgaaagactaagcagaggtgccacagaaaacatgtttcccgtcagaacgcatccaaggaacagacttcatttcctcacacaacaaggatgtaggactaggctgggaagggagggtaccccacttgaaggaggggctgtggctctcagcacaacccagcacggccttgatccctgactcccaggaggcacggaaggacaagaaagcagccaccagctccagacaaatccagcccaaggggaaacacactgacatccacagtccatgtggtgacgaagagcagttggtaccgcatggctttaaattgtttgtatttctgtcaggaggcccatggaaaaaaagcagggctctcagcagctgggaaaacatgttgcaaaaggagaattaagcaattctctgtatgcacatcacagagaaattaagctgatctgagtgagagaaattaagcttattcgacatgccttcggctggaaaacaagcctttttaaatgactgggaaaaaacttgtgaaggttacatggtttcctccttatgtaaagcacctgaggactaaaacaaattcactggccggtgggaatgcagcaaagcagcaactgcccaatgatctactccagggcacccacacacaccacaggaaggaggagcaggccggggcagcctcctagacacgcgtgcccaagatcgtgtcctatggtctcgcttcggccgctcttcaccaaagcctcttccttggctgctgccatcctcgcttttgactactgccccacgtctcccctcttgcccccaacctgcccttagaaccaggttccttcaggccaaatcccacctaggtcttctggaaaatgggaaaagtaatcacagcaaatacctgcaacattgtacgaacgggctctgggagggctgtaggaggacggcatgtccccaggttactagaaatgacttgccatagtgactacattggcaaggtgttccaattcccttgatattctatatctgatctctccctccctcccactccctttcaaggatctacaaaattcaccctcccacaagcagcatgtgatcccactgtgtccctccattacgccagcaacagctccagggacgggggtaggggaagtctccaaaataaaatccaccctccttgttttgttctgcattgcaaagccctcaacagggtctatttatcttcaaagtcctgcttccttctgctctggacacacctgtctacttgctgacccttcacccagctttgctcgtgtcattctctgggcctggagtaaagttctccccatctccgccaataagaccccaccacggcctggtcaggcccagacccatgtcgctcatgcagagccgcatgttcctcacagcagtcaccatcactctctcatcccactgatggtcagttagggccgtggttgccctttctctttcttactccctttggcacagaaatgctcaatacatatctgctgaacgaacgaccagacttcaaccaaagcagaaatcagcccacatgtctccatataggcagatgacaggcagctggtaatgatcgtgtttagaggagaagatgaagtgtcaggcaaggtgaggggccaaaccctcattggcctcttctgtaccatggctgggctaaggcttttttattcttttgtttgtttaaagagatgaggtcttgctatgttgtccaggctggcctcagcctcctgtgcagctgggactacaagtgcgcaccaccactcccagcctggggaaaggttttgatggagtccagagacagaaggtggggaagggaagaatctttacaagcaatttgaggtgcttaggatgcaagggtgctcgcctggagaagacagaagctaggagcacaacaggttaggtcagagtagtaggtgctggccttgagggtgaaaagtaggtttttatgggaggcaagaaggccttgaagctaagagggctgtgggaacacgagatgtttttagcagcgaagtctaacagagcaggggagagaagggcaaaaggacaagctgtagtcaaagataagagcggaagaaattgtgatctatttcaccctctttgggctagaatctggatcagcttctcagacataggcagcttttgaaacttcaaatgcttttcatacaagcttctgacgggaaataaaactgaaaaaaaagtacttttatgaggctatggggatttcatctgagaaactctcttagcctgtttatttttgaaaagcaaatgccaatcctagttttaaaatcctcggttttctagaaatcagtgtttgggctagagggacactcaaaaggtcatgtgggctttcttctggttgcagctggactgcatgtaagcagttgtactggagcaaggagggtctgttacaggctatacaatgctctcaacacagaaccccaggcttcctgggaacccaattcatcggttacaatgaagtccagtgagctgtcttagattcttttatacacacacacacacacacacacacacacacatacacacacacgcatgcatgctggagtacagtggcatgatcatggttcacagcggcctcgatcttctgggctcaggtgatcttcccgcctcagcctcccgagtagctgggactacagatgcacagcacccatgccttattaaatttttttctattttgtgtagagacgaggttgtgctttgttgcccaggctggtcttgaactcataacctcaagcaatcctcctgcctcattctcccaaagtgctggaattataggcatgagccaccgctccggcctcttggattcttcataggtagtttaagtctgttttcccagagaagctggaaaacaccaggtccctaccacttatatagaagaatcttgtgcagagaaactacacaggaaaccttccctcctctaggatgaagagctctttaaccttctcacaaaaagctgttaacattttcctgttatgttgcacattttctcatctcttaaaaaactgaacaagccacaaaacaggacattcgaataagggtctttccagtccccaagagtgaactggaaagcagcaaagcaaaccaaaacaatgagagcacagataaagctaacactgaagacagctagagtttttgacttgttttttttaaaactaactttttattgtagaaaattttaaacatatacaaaagcagaggatgtaatgaaccctatgcacccattatcgtgtttaataatgatcgactcataaccaatctgagcttatctataccctacctgttcactcatccctcctccttcagtataattttgaagcaaatcccagattacaaatcttttcatttataaatatttcagtttgtatctgcaaaagataaagactcttgaaactaatgcagcatatcaaaattacacctaaaaacacaaataacaatgagaaaccctggatttgactcctgatgctgtcacttactagctgtgtgactttgagcagataaggagtaaaaagcccctaaaacccaggaagagttttattagcaaatacctagacctcagcctgttttaactatgatgccaaactccctgctcaagctattcttcccatactggccctgatgatctgacagaattgaacactagctttttgttgtgttcttcacccactacctcagcagattggatttcgtttctcatcacggctctgcattaccaaggatattcacagtccatcttcccaggggaattgtacagaaacagagcacgaactgttatttagtttcagaagagatggcagggactgctgccttagcctgttacactggacatgaagggcagcaggctttctggggctgggtggttgattccacttgcagtgatgtactggccacagatacagacgcacattttctaactgtggtctgtgggaaggccatgtggcctctgggaactggagatgtgacagagaccctctgtattctttatctttgtctcaaagtcagggaagacactgaggaataaaaggccttttacgttctcagctaccacattgcaactggaatctgaccttgaattcaaggataaacacaagaaattccacccaacagcagcttcagcttaggctttgctctcatcttgctcgatgccctaaacactcctctttgctactgttccccttctccacattccccgccctgacacagacacccacggggacagggggtgttttcatgcttgcggtattaccatagcaacaatttctcttctacctggaaggctggaaaccctgcagtgctctgtgctgagaatgcaaagagggaacactatcactttccacctcagcacacaccacaagccgcacacgtgcactcacacacagccccttctcaaggacatcacaatgagatcatgacaacaaatcaggatgctgacacctaacaacacaaaatcagtgcaatgacaaaaaggaggtaaaacatttcttataaaaaggtattttgtaggtatcaattcttgagggatttttattgtgaaatttctaacatgcatctctcccttgatgaggccacagacacagaaaaatgtcattaaattattttagtaaaatatacaaaggaacttaataggtggtgtgtggtttctagaaagagggccactccaagcttctgatccccacaggctgtgacaagcctgagaagcaatagctaactagtacacaaaaccacaaaaagagccactaaattttaattaagtacccatagaaactcgttaaaaatccacagagaatctttttctgtgagtactacagacagtgtgttttagtagagaccaaaaataacaacaacaaagagacaagtaggtgtgtccttccacaaggacagtccaaggtgagcagccctggcatccaagcctgcccgctgccatgggtgggcaggatgaccagtgccctcccagtaggacaaaaactcatgcccaatgcaccaagaagacaaaccctggatttccatctctccactgcaactaatttggagttctctagtatagcgtatcgccgtctttgtttctaggcccctcctgtactcatttcttctgaatgtcatccctgagattctaaaccttctgagtaggagtaagaaatcaacatgaaacctgagagaaggagcacagcagtgctgtggacagagagtgcagaccctgagagtgggagcacacacacgacagcctcccccagcacgtggctctccccaggttgcacagggcccttctctgaacttgaataacgtggactaaaggagagctgtcatttcttatagaatgtatcagttagcaaaaaaatcaggttgaaaaatctacccctttacatggcagaacactggggagctggtagaaatgagttgagtggtgagtgatgagtcatcttctgttccctgatgggattttccacctgcccactttaggggaactccatgctcttgtggcagcaggttcacaaaactggaggcagttccccctttctaggatctccgttcatctcctgaggccgcacatctgcacacaccatcctcactgggcagctattacttcgtgacacaaagtgccaggcactgcacttgacactttacccacgctgtttccattggttttgcacaaaagctctacgaggtaggtgcaaccgttcttattgtacacggaaaggaaatgtggcttagggagatcaagtattcaccctatgtcacaaagctagtgagtggaggagctagaattaaagcataagtgggtttaatatcaaaatcccttgtcttaaccactgagctataccgtttccctcactgtgatgcagcaacagccacgcatttcactgccattcatggcctcacagcacccagtgctgtgcagagctgcacatcaatcaacacttctcacgtaagggcttcaaaagaactgttgaaacagacaacttactatgaaagcccagcaaaagacgtgtcccaaacaatgcctcttcatgtgaatggaacaggaggttcgtgactggtctcctgagaaggtggaaacactaacccaggaaggcagctcaggaccagaagggagcaccaggatgttgtctgggacaaggaagagccaggcccatttcctagggatcagggaggtcggcgacatctgaggccccaggtcgctgccgggttctcggagcccacgctgactctagacttccttggctctgaaatgcaggtgggtgtgggctctgccacctgccggggggtcagcagttgcctctgcgagtttcgaggggagaaacctgaggggctgcagcagccctgcagagggagtgggagtggcagcatagtccatgttcactcacagctcccagcctcctccaaggcgggccaaggggagaggcaggtgcttctaccattagcatctgacatgagggataaagtagctgaaatacaggggtaaaaaactatttccacagggccaagcagaaacaaaaataaaatttttattcatattggcgttttgttataatgcgtatgtatttttacctttccctatttcgggttgtcagctctctcccttctgaataatcactgaaacagcaagcatggtatttgactcttaatgggaaggcagggtgggaagggaggcaagcaacatttgccttttattatttttcttcttctttaaaagaatctaacaaacacatctactctatgctgtatttactgtgcttcaatagcaggtaagggaagaggatgtgcttgcgtgtgtaattaaccaaaaccttcccaggatcaagaagtctgtgatgaatagattcactatgcttttaaattttaaaaagtgaaattttaaaaagtgaaaactgacagaagtactcagacacaagtagagttaaaaatcctgaagcctccttgctatgacgccagccctgctcagtacgtgacggaagggaggctcacagggatggtgtctgcgacccactcagctctgccatttaccatcacctgactttaagccagtgtctattttgtagggctgctgtggggaccaatatgagctgagagctctgccaggcaccctacatgatatacctgtaagggagcgtccttctgcggcctgaacctgaagctcttcagagggacccatgctgggctctgaagaaagtgactcaccttggaggagcaagggcaggtcacattccatgatgagaaattctcacaccaccctccttcatatttgactcacatcatgcagcatggacttccactccagtaaatgagtcctcatttgtgggcttaaaaatctttttgttacccagctatttggttcttgtcaacgctacttcctgaataaaggtcttccctgatagtaggaacaagtggcccaagcttcattcatctctagataaatgtgaaggccgtgctcagcacaggagtcagctgactggctgggccccaaattagagtgctgttaataagtgccaaccacccgccatcacagctggagctgccctggcattgatagctggtccacactcatttacattctcttcacgcagccatgcagctactgtaggaggctgcagatgcctgttttttaaccaacaaactggttcactgcagatgtgaattttggttgtacttcacggctgtaaagttaaaaacagcaaatgctacaaagaataggatgggaacctagaaagggcagaaaaacaagcagggaagaaagctggcaggtgagaaaagataaataaatacaagtgacattgggaaaagatgggtggttacacaaccacacacacatttgcagtttccacgaaaagactacaccagatgttcttcagttactctgattaaactctcaccacctgatggtctctcgtcgttagcgcttgcttcatgagtgtgcctaaacctccaccttgtggccctaagtttctggaaaacttgacttacacagctctgagtttataaagcaaagttatggctgtggcaaggcagaaaagactcaacagtgaaacttctgaccctaagaatacatattccagaagcatcaccttcaaatctccttttatgtaacactcttcagtctcacaccaaacacacccaattcattcctaaaagcagcacactgaaaacaaactaatgaattctttatctgagaacacacaagggagctgagagccttgacaaaagcattccatcatatcaatgaaacaaagactctctccatttcatcaaagatacagtgtcttattcttcagggattccagaggactgattccagccattcaagtcctcctccagaggccgtcttatattaatacgtttatattaatgccgtattaatataaacgcctcatttcagagcgacaagttcctgaaaagccaactggaatttatattactggcaaagacactgcaatgagaaagcaggtgcccttagtctcacacgggtcaaaattagcttgtggctcatgtcttaaatatcaggaatcctcaaggattagcgactgctttagccatcttgctacaaagaatggcataaggagaatttgcacaactgagaaaggtaaaagcgtatgcgctaataacatggacttcttagataaagtctaaatgcacgtagcgatttgctttggtactgagcccaaaagaactgtgtcaattctgcttacaaaacagtgttttgctgacacatacttttcaaacacccaagaggaagaaaaccctttcctcatggagcatctgtgccacctagtggcaactcgttccacagcccacaaataaggacagaagattaggcataaactctcctttctcatccaaaggacaaggtggggacttctctcattcctctggtggtcactgagccagctccaccaggccgtcactgcctcaggtccccatataacatttttcactttattttccatgatgggccaaacacctacaatccttaccctaacattagaaactaaaatgtgaatgctgttatccataggtgaaagtcaagttctgaaacatactgtaatccatcatgtaatcataacacacattctctccactgcaaaacgttgctgaggggcataaaaagatgtgaataaatgaaaaaacatactttaaacttagcatggcccagcatttctaagctaataataatctccctgatgggcaccttacccctctcctcctctttcctccttttgctgctcatttcagactccaaaatctttttccagcctagatctctccctgtgttactgacccggatcactgatctagggtcactgatttatggagcacctactatgtgccaggcattgtaaaaacacgtacacactggatgtctcccctaaaaactcaacatgtccaaaacaaaagtaatctctcctgaatcttttggattccatttccagttttgtaaacagcatcatcaactacatagtggtccaaaccagacacgcctgtgagacctctggctttctccccaccttcacatgcaacatatcaccttctaatcctctacctctcaaatctgctcctgttctccaactccaagggcagttatggtccttatgatccttatcagtcaggatgtgctaggttatgctgctggaacaaactcaaacctcagtagttcaaaacagactttgttctcactcatgctgcacatccctcttggcagagggaaaaaatgaaccatatgccctttaaaaaaaactgcggtaggctgggcacggtggctcaccctgtaatcccagcactttgggaggccaaggcaggcagatcacctgaggtcaggagttcgagaccagacggaccaacatggagaaaccccgcctctacaaaaatacaacattagccgggcgtggtggcacatgcaggtaatcacagctactcgggaggctggggcaggagaattgcttgaacctgggaggcggaggttatggtgagccaagatcataccattgcactccagcctgggcaagaagagcgaaactccatctcaacaaaaactaaaacaaaacaaaacaaaacaaaacaaaacaaaacaaaacaaaacaaaacaccactctgggaggccgaagcaggtggaggattacgaggtcaggagatcaagatcatcctggctaacatggtgaaaccccgtctctactaaaaatgcaaaaaattagccgggcatggtggcatgtgcctgtagtcccagctattcaggaggctgaggcaggagaatcgcttgcacccggaaggtggaggttgcagtgagctgagattgcaccactgcactccagcctgagcaacacagcgacactccatctcaaaaaaaaaaaaaaaaaaaattgtggtgaaaacacacaatacaaaaactacccaattaacacatttttaagtgtacagggtctgttagcaaaatgttgtacagctgatctctaaacaacttaatctggcatgactgaaacttcccactgcacagtgactccccactttgccttctcccagcctctggcacccagggttctactttgtgtttctatgagtctgactactttagatcctgcatttaagtggaatcgtgcagtatctgtccttctatgactggctaattgcactgaacacaatgtccctcaaggtggtttatctgtgttgttagtatgtgccaggagttccttcttttcaaaggctgcataatataccaaattttaaccattcatctgttgacgaacatgtcagtaagtggtttccatcttgtggctactgtgaataatgctgcaatgaacacaggaacatgctgagatcctttcccaaaggatttcaattcctttccaccggctgccttttcactctgttgatggtttcctttgctgaaagcatcttagtagtcacttgcctgttttttgcttttgtcaccttgtttttggtattatacccaggaaatcattgccaagactgatgtcatgaagctttccacctacgttttcttctagtttttatagtttcaggtcttacacttaagtctttaatccatttaaagagttgatttttgtgttatgatatgagatatggtatcagcgtctaagttcattcttttgcatgtggatattcagtttacagagcaccattaatcagagactaccttttcccccggtgggtgttctttgcacccttgttgaagatcagctgatcataaatgtgtggatttatttctgagcactgtattatgttccattggtctacatgtctgcctgtttaaattactgtagctttgtaataagttttgaagtcaggaagtgtgaggcttccagctttgttcttctttcttaagactgtctaggatatttgggatcctttgtggttccatatgcattttagggatgtctttccatttatttatgtcttctttaattatttcagcagttttttatagttttcagtgtataagtctttacccactccttggttaagttgttcctaagtattccaacttttttgatgtattataaattagattttcttaatttctctttttggagtgtttgttagtgtacaggaacgcaactgatttttatgtgctaattttgtatcctgcacctttactgaatatattaattctaacaagtttttttgtggaaattgcagatttttctatgtataagatcatgttatctgtgaacttgcacggatatagatgcttttgctttttcctgccaaatagctctagctagggcttccagtgttatatagcatggaagtggtgacagtgatatccttgccttgttcctgatcttagtaaaaaaaagcttttcagtgtgtgtgtgtggtttttttttttttttttttttttgtgacagagtctcactctgtcgcccaggctggagtacagcggcacaatctctgctcaccgcaacctccacctccctggttcaagcgattctctcctgcctcagcctcccaagtagctgcgattacaggcgcacgcaaccacacccagctaaatttttgtatttttagtagagacagagttttgccatgttggccaggctggtctcgaactccagaattcaggtgatccacttgcctcggcctcccacagtgccaggatgacaggtgggagccaccatgcccggacagtgtgtttagttctcatactttgtgaattttcttgctgtttgtgatttctaagtgtatcgccttgtggctggaaaagatacttggtatgattttgatcttaaatttgttaagacctgtattatgatctaatattctccatcctggaaaatgttccatgcgcaacagaggagaaaaagtgttttctgtgcctgttggctagaatattttgtatgtgtctgttaggtctatagtgttgttcaagtcagctgtttccttactaatcttctgcctggtggtgctaacaatgattgaaagtgaggtattgcaatctcctactatttttgtgttatttttcccttcggctgtcaatatttgcttcacatatttgggtgcactgatgtcgggtgcatatacagatggtctccaacttacaatggttttacactttttgactttactgtggtgtgaaagtgatacacattcagtagaaactgtaattcaagtacccatacaatcattctctttttcactttcagtacagtactcaataaattacatgagatactcatactttattctaaaataggcttcctgcaagaagattttgctaaatcgtaggctaatataagtgctcaggcttttgttttccttttttcaggagcttgcaagctcttgcttcttctggtgcctgtctgaggtatcacaggccctctggagctgctgtaagctgcccagctcttttttggcctcagcagctccaaggcatctagagtaggttgggttctgccagcagtgagttgggtgagacagaagccagtccctcaggcagccccttgagaagcccaaatgctgaacacatgctctactcttcccctggacccaaaaagcagccttcgaggtgcactggactctgcctactgtaccgtgggtcctctggcgcagtacaaaccacccagctttctcttgttctcagcagcccccagggacctagaccatgccaggtcccatcagtgcttcatcgagtgagacaggaacgagagtcttgggcagactccagaaaacctagaatgctggactcatgctccaactccttccctcccgagaagagcagggagagggcaatgaggagtcagtacgtgctagtttcaccatcccatttgtcctcagaggtccccaacctggtgccctttcctgtgagacaagacagaaaccagtcccttgagcagcctcctgaaaggtctgaatattagatatatgttccagtcttctttttcctccccagaaagatgccaggagttgggagcttcctcccaatcacatggtgctgtgccagggggaggaactctggagagccagcgtcacaaattccccagcctttgatgcaactggtttctggatttctcacagagagaaatggtccttccgttgttgttgaactgttctctctatgggaaaaagagggtctggagctttctcttctgtcatcttgacactaccccacaccacatgcctttacggctttttctgcaagtgatctaactactcacatgtttcactgaccacaagaagctacatggctaccttcaagttcagcaggccatgtatattcctcccatagacaaacaaaaacatatgtggtgttcctatttgggatcttaagagcccctgggaagctcccaccaacatgccaagttgatactcactagatgctgttccagactcatgtgtgccctcaggcttttattttttaaatttttttcttttaaagacagagtcttagtctgttgtccaggctagagtgcagtggcgcaatcatggctcagtgcagcctcaatctcctgggctcaactgattgtcctgcctcagtctcttaagtagctaggactatgggcacacaccaccatgcctagctgagttttaaaattttttttgtagagatagggtctatgttgctcaggctggtctcggactcctagtctcaagagatcctcctgcctcagcctctcaaagtgctgggattacaggcatgagccactgggcaaccaatgcagctgcttttaaatgtcttcaggctgggggtggtggcttacacctgtaataccagcactttggaaggctgaggtgggcggatcactggaggccaggagttcaggaccagcctggccaacatggtgaaacctcatctctactaaaaatataaaaatcagtcaggcgtggtggcgcatacctgtgatcccagctacttgggaggctgaggcaggagaactgcttgaagccaggaggcggaggttgcagtgagctgagatcgtgccactgcactccagcctgggcaacagagtgagaccctgcctcaaaacttaaaaacaaaaacaaaaacaaaaaacgtcctcagagaataatggtctctcctcttctttggccttcccaattgtacataagcactttcactggcagaccttctttgaaaccttaccaggaaatgtagttcccagctccttctaagcaactcatgaagacccaagaggctgtgcagtgctgtacatttctcacctggactactcaataggcaagtagactttccttatattttatctctccccacctcaggacagtgtgctgcatgggcctgcccctactcagcttatgagcctccttcacactcctagcaccagtaagcgtccacattgctgccactcccggggcctagaacatttctccatctccactccactcccaccctttccatcctttggctacttcctccttatctgctgcatcttagcgtaggcatcacctccccaggcagtccaacacctgacccactggaagcacacaagggacacgctagcactctgctttcttaagagctgcaagatgccagcgactgttgtgacaattgttatagcaacagcctggggtgcgaacatataaaatggccagaaatattaatgctgaaaacaaaagaaataaagttttgatccattagtttagtttattcttccttttctaatctctaccttaatttctttactctccccaaggcaaagatattgcagtgttcaactctaatcatgcaattttagaaaaatggcttagagcgtatttgtctaggtggatgctaatattcactaaaaactctaagtggcttctaaatagctgaaagattttaagacattcttagttcacagggcgccaagttaaagggaacaaagatctgcaacagtaatgcacctagacagctctgctcccacgtaatatagtcagttctcatgaggagaaacagtcaaataaataacctaccagatgtgatggagatgccactaagatgcccagttcctcaatcaaagaagcgtcgtttggactttgaaaatggcaaaaggtgtgtgtgtggggagggaggggtagcaggggctatttgagcacaggtggtgaagagagcaagcaagaaaaatgttgacacagtggaagaaaaactaaacacttcccactttacattatagtatctgtcctaaagaagatgatataaaataggaatccagagctttgtaactggagtggcaagagtggctgccatctcagtaaccatgtcaaccgttactcacaaagtactcgtcctcatttgcttatgaaaaggaaagcactcaaatccttcttatacatcagcagtcaggtaaacagcagatatttgggccatgagggcagcccataataccataattcaatatacatctagaaaaaaatgtgcctccctacctttcggcagtgaggattaggacagctgaacctcttcacatcactgtccaacagagccggaaagctacaggacgggcacctagagtcagaacagcagaactgacattacttcaaacattaaagcctgatctggttccagctccatgtggctgttcatatgaagatggagttttgagctggacattcacatcccctttatactccttagttttccttaaaaacacagattgaacctcttctttgtgctggctcttatcaggaaacataagcaccacatgaggtcctgactgaatataaaccactcaataaacacgtcccaaccttaatgagaactccttgcatataccgatttccctccagcccagggcaccatgattgtatctacgggccagaagatttgggggtgccaagatatgtagacagaagtttgagctacagtctgggcgcggtggctcacgcctgtagtcccagcactttgggaggctgaggtgggtggatcatttgaggtcaggagttggagaccagcctggccaacatggcaaaacctcgtctctactaaaaataagctggaatgtggtggtgcacgcctgtaatccaggctactcaggaggctgaggcatgagaattgcttgaactcaggaggcggaggttgtagtgagccaagattgcaccactgtactccagcctgggcgacagagcgagaatccacctcaaaaaaaaaaaaagaagtttgaggggcagatttttccattaatagaattactggttactcaatggttctgaggcgtaaaaaataaaaataaataagtaaaattattgataatcttatttctcagcaagaaatgtcaaaaaacctggaagataaacacaattttcatcatctgatgcaagtgcccaggtagttttcacaatggggaagagttggcagatggcacgctctgcctgagaacgaacctgacaagctcgtcggcgtaggctgccgcaacctcctcctcggcttttcgctcatagtacttatacaggatggtctgggggagcaccttctccagctcactggttgggaacgaacacgtgcagctgccttccatgcagctgagctccaactagaaaaaggcgaaaaggcaaagaaaaaaaaatcaataccatttatagaaaaataaaaagcgtcagtggttaaaaacatagatcctgagacaacatagcaaggatctctctgcctgttcatctctgagaaatcacacttaaatcatggaaaccatgaaacaaaaatccagtacatctttgatatcactaaaggacctctattagcccaaatcacaatccacaaagactgaaagtggcggaagggcaaatggcttagcagaccacacacagaagcccatagcttagggtctgaaaaggagatgctggggagaagttgttcccctctacagatattagaaagctggagaacctctggaaagcagagctgagtggtggggaggggcagggactcaaagtaataaactgaaaacagggacatgggtggagcctctagttcctacccgcttcagaaggaattggctgactctgagagaaatgaggaagatctcctgaacagctggaccacacggctctggactggaaaccactcatagaggagagcagagctgaggggtggcctgaagtcagagtctgaaatggagtctgcataatgaacagagaactctccagacctttcctccccctcagtttcagaatgttggaaaatgggctcacacccaccaggcaggaggcagactgaatcaccccaggtaagagacttcagagccattcaggttcataatataaaagctaactggctcctatgcacctagagtcaaactcactggtctataagccccactactcacacagctttcaaacagctctttaacatgaacaaaaagtgtcagacatgaggaatgcttcccacatgaaagacaaacaccaaagaaaacaaatggaaaaagacgacattttaaaaataactagctaaaatttatgaggcatttaccatgtgtcaaacaataagttcattaaactcatcacctcatttagctttcaaaacaatgctatgattatttccattttacagaggaagaaacagtggcttaaggaatttaaattgctcaagatcacagggctagtatggctgatgggggcatggcccaatgcattctgcttgactccaaaggtcacgctctttgaaaaaacataaactttatttatttatttttctgagacagagtctcgccctgtcaccaaggctggagtgcagtggtgcgatctcagctcactaagcctcccgagtagctggattacaggcacccaccaccacacctggctaatttttgtatttttagcagagatggggtttcaccatgttggccaggctagtctcgaactcctaatcttgtgatccacccaacttagcctcccaaagtgctgggattacaggcataagccacagcgcctggcctatttttcttttttagagatggagtttcactcttgttgcccaggctggagtgcaatggcacgatctcaactcaccacaacctctgcctcccagattcaaccaattctcctgcctcagcctccccagtagctgagattataggcatgcgccaccaggtctggctaatcttgtatttttagtagagatggggtttctccatgttggtcaggctggtcttgaactcctgacctcaggtgatccgcctacctcggcctcccaaagtgctgggattacaggcgtgagccacccgggcaaaaagtcatcttcttaatcactgtgttagttttctattgctgctggaacaaaataccacaaactcggtggtgtaaaacaatgtaaaattcccatactgtgtttgttatgctggtgtccagagaaactcactttggagagagaaatatgatcttgtgtaaagtaagttatgttattttaatatatatttaatccaataggctgcaaggttctctctttctgaggtaaccttccctctgaatacaaataagatgatgaacgaaggaggtgctcctctgcggctaggcgtgggagtgtggaagaattctactgtgccctgaaaagaaatctgctgtgctcagagaacccacataatcacatacatcaggtaatgtacacataagcataccagcagaactccacctcaccctcaaagaggcacttacacttatctatcaacatggtctccttagactccaggaatgtgtcctatatacatgggacatattacacagttcttacctttccagatccaaagactgcctcttgggcatatctgatgagacactctttgcagaacaagtgagcatctgcgcactgcgtcagctcctcgaatggaaattccccatagcagcagcgacactcaatcagctggccatcctgcaggcagtcaagaaacacacatgaaatgtcctgcacttaaggagagggggagccttgtctcccatcctcatctctctgccaccccccacacaaattctgaggtaaagcaacccattttaggggccataaaacaatgatatgctgtttcgtgctatataaatctagctcaagatactaacacagtattaatccatacctaaaacagcgaggttttcgtgttttttttctggtattctttagagtaattctttatataaagttatcatattcaatcccatggtgcaaagggaactagaacatctgtactcagatgctaatgtgattataaacagcaaggataaggagtatgagagatgttacccaaaaaactttcaaaagttgaattttgttcttgtcataaggagtgtgaatgggtctatcgaggtctgcgctttattttaagggactattgaagctataactaaagcagcaacctcaagtaatgtaccaggctattgactccttttattaactatagcaacggatccaatcaccaactcattctttttttttttttttttttttttgagatggagtctcactctgttgcccgaactggagtgcagtggcacgatcttggctcactgcaacctccacctcccaggttcaagcgattctcctgcttcagcctcccgagtagtggggattacaggcacccgccactatgcccagctaattttttgtatttttagtagagacggggtttcaccacgttgaccaggctggtctcaaacccctgacctcgtgatgtgcctgccttggccttccgaagtgctgggattacaggagtgagccactgcatccagccccattcttttatttatttatttttaatttttattagaaatggggtgctgctatgttgaccaggttagtctcaaactcctgggctcaagcaatcctcccattttggcctctcaaagtgctggaattacaggcacgagccacggtgcccggccaccaacccattcttaataccacattagaaagggtcagtagccaggtgtagtggctcacacctgttcccagcactttgggaggttgagatgggtggatcacctgaggtcaggagttcaagaccagcctggccaacatggtgaaaccccgtctctactaaaaatacaaaaattagctgggcattttttttacatacagaaacccatcttgccctgaggttagacatacctcgttaactctaaagtgatatctaagttgtaaactttcctttatgagtgtatctgatgaatgtcaggtaatgatttttaacaggaacatctattatcttcccttcaattctgattcagtgtggtataagagtgactatactagatcacgtatctgactataacttggctgaactgcaaactcaccaaacaggaggttatccaaaaacaaatttgccatcaaaaatgctgacaaaacatggtaagagaaaacagcccatgaaaatgcccagaataaacaaggtgagatttcaaactaccttttgatactgttcttcattcatctgtagggcaagcaaaaagtcttcatgctgaagaacaaaaaaggcacacattcagacacaaatttagtaaaaatgacactaaccatttagtatttatttccataaacataactccagtattgcgatctcttcaattacacagtttagcagttcaaaaaggttacctgtgaataaattttaagtggatcagagagctagaaaatacaggacaatatttcttaagtatgactcaaaatgtagaataaataagggaaaaggctgacacataaaacactttgaacagcaaagaatagcatcaacaaaaacaaactgaacaaataaaaactaagtttggccgggtgggatggctcatgcctgtaatcccagcactttggaaggccgaggtgggcagatcacctgagatcaggagttcgagaccagcctgaccaacatggaaaaaccccatctctactaaaaatacaaaattagctgggcatggtggcgtgcacctgtaatcccagctacttgggaggctgaagcaggaagattacttgaacctgggaggcagaggttgcagtgagccgaaatcgcaccattgcactctagcccgggcaacaagagtgaaactccatctcaaaaaacaaacaaacatacaaaaactaagtttaacaacagacttcgctggcgaggctgtgtggtagtgggcacccccacacattactggtgagaatgcaaaacaagacaaccacactggtggggcactggcacagagtcatcaatgccacttccaagagtctagcccaaagatgcaactgggcagaaacagggaatgatgtatgcacaaacttatcatggcactatttataatagcaaaaacctggaaacaaccctaaacatccatcaataggggaatgactgaataaactgtggtattacataaaatggtataccagccagtttcaaaaaggaaagagaaaaatccctatgaattgctgcagagtgactgccaggatgcatggttaaatgaaaaatgcagtcgcagaagagtctgccaacatttgggattacattaaattatttatgagacagagtctcactttgtcgcccaggctggagtgcagtggtgcaatctcagctcactgcagcctcgacctcccaggctcaagagatcctcccacctcagcttcccgagtagctgggactacaggtgtgagctagtacacatggtggcacacacctgtaatcccagctacttggtctgctactatctggataagaaagacgggtaaataaaaatacgtatacttatttgcttttccataaaataaggaaaggtaaaccaaagactaacaataatggttatatataaacaaagcagggggccaggtgcagtggctcacgcctataatcccagcactttgggaggccaaggtggggggattgcttaaggtcaggagtttgacaccagcctggtcaacatggcgaaaccctgtctctactaaaaatacaaaaattagccaggcatggtggggcgcacctgtaatcccagctactaaggtggctgaggcaggagaagcccttgaacccaggagtcagacgttgcagtgagccgagatcctgccactgcactccagcctgggtgacaaagcgagactccgtctcaaaaaacaaacaaacaaaatgcgagaaagggacagcacaaaagctagatatttctgaatattccttgttttatagtttttatttcagaactaaaatttttacaaccttagacaaaaaaacaaaaccaattctctaaaagttcaaaacaaacagaaagaaataacccacccttttttttttttttgaaactgagtcttgctttgttgcccaggctggagtgcagtggcatgattttggctcactgcaaccaacctcgacctcccatgttcaagcaattctcgtgcctcatcctcccaagtagctgggattacaggtgtgtgccaccatgcccagctaatttatttttagtagagacagagttttgccatgttggtcaggctggtctgtaactcctgatctcaggtgatctgcccacctcggccttccaaagcatgtaatcatgctgggattacaggcatgagccatcccacccggccaaacttaagtttttttagtcttgaactcctggcctcaagtgattgcctgccttggcctcccaaagtgctgggattacatgcataagccactgtgcctggccagaaacgaataaacttgtttatcaagttaatggtataagcaccgagatttatttcaagtgactttaaaatattttaaatattgaataatgttattaatattattaagaaccaagacttttagcatcagagaaaagaaagttggcagggcatggtggtgcatgcctgtaaccccaacaatttgggcggctgagttgggaggacggcttgaggccagaagttcgagaccagcctggacagcatggggaaacccaggctctacaaaaaaagttagccaggtgtggtggtgcacacctgcagtcccaattactcaggaggttgagatggaaggactgcttgagcccaggaggtaggttgaagcagtaagccatgattgcatcactgcactccagcctaagtaacacatggagctcctctgtcaaaaaagaaaagaaaaaagcaaagaaggtactttggaaaattgttgagtccaggtctgagaaagcagaagctgaaacggggtcatttggctgtgcccaaaagcaaagatgttgtcagagactacaggggtcgggttaagagagactaacttgaaggggcagccaatagtcagagatgggacaatgtgaatatcaccaagaataaaagactacaatgaactacattcatcaatttgccaatactttaaatacttatctgataagattggtgatatcaatgaatgtcattctataacagatggatcaaaacaataaattctaatttctgcttaaaatctagaattttggtcaaaaataatcacttcattcatttttgagaaaatgcctgccaaatacctattttgaataatcatagtttttctgtcacttttttccaagtaaaaagtggccaatgcagctgctttgtggctcagttgcataagtgctttcctcatacctggatataagacaagcttcatatcctgggatgtggcagaagcactttatgaagacttcattttattacacagaatattgaaaagatgtttccaacggtcaaaacttggtaaagtaatttttactgctttatcaaagacattttcaggtgaaactggtgtgtcttaaaaatgtaagtgcatggtggtgaagaaaacaatgattgtgacgatggctctacgacactggcctgattcatgccaaggcaccactgcttttgttctgctggtacaaactcaatatggtgaaaaagcaaatatagctgagcttgatcaacagagatgtgaactgtggggacccacttatgtgctgattttcttctgcttctgccaccctgagacagcaaaaccaacacacccctcctcctcagcctactcaacgtgaagaccatgaagataaagaccttctcatgctgatccacacttccatttaatgaatatgaaatatattttccttctcattttcttaataacgttttctctagcttaccttattctaagaatacagcatgtaatacacaaaacataccaaacgtgctcatcgactattatgggtaaggcttcctgtcaacggtaggctgttcacagtgaagttttggggcagtcaaacattatatgctgactttcagctgcacagggggaagcactcctaactttcatgttgttcaagggtcactgtaatgtcttagcatagttataagaggtttgacctcgcagacccccaagagagtcttgggaaacccagggatctctgggtcacactttgagagccactggtttagaagatacttattaaacaaccaatatatacattccagctgacttgcacatttgatactatatttagaaaaattaaagagcgaaatggaaccgaggctgagggaggaggtaaaatagatacactaagctccaattaaaattttctaacatgaatctgatttatgaaaccacaaacataagtattatgacaaaatccaggttttttcttttaaaaactttgcatatatccaaatttaacagtctgaagaaaagggaaatcttaaaagacagttttgtactaactaaaccctaagagcaaaccagaatcccagaaacacaccccaagaccagagcacatcttcctacctctgccatctctttgattttctgctcatagaactcctgctcttgttgcacagctggaaggagagcacgtcggtcataggacctacaatgtcgtcgcttattttcaagaaagaacatcctcttttctatttttatgtcacctagaagatatacgacaatgcaaaagcatgcagacaactatgtgttaggaacctgggccagccatgtccattcttcccggcctcatcctccaccttctctctgatggtacgtttcatgacttttctatcacattctaccatttgggaagactgggcttcttaccattagccaacctaccatccattttttgacctttctgattctttccctctgtttatgctccaattggaaggcatctcctatcctgtcactagtgtactatgtgaatataccacaatttattatctatttcactactgaggacatttgggtttgctgttttgggttaatctgaatagcgctgcttatagccatttgttggtgaatgtatgtccgcaatttacctgcgaattgctagatcatgggataggcttacttccagcttcagaaaataatgccagttttccaaagtggttgtaccagtttacacccttcctccatcagcaatgcatgtgagttccagtctctccatgtccttaccaacacctatcatcggtttttaattttagccattctggtgggtgcaaatgtgctgtatgattttcaaccatttttattttcaaagcattcaaatatacaaggggctgaaggaacagtacctagattcaccacaatatattataacatgagaataaaagagagcagaataacaaatattagacacgtaaatgatctgtttaggttttgtacttgtttcactgatttggcaatttatgattttctttttggagacagagccttgctctgctgctcacgctggagtgcagtggcacattcacagatcactgcagcctcaactcctgggctcaggcaatcctcccgcctcagcctcctgaggagctgggactatacaggcagatgccaccacacccagctaatttttttgtatttttttagagatgggattttgccatgttgtccaggctggtcttgaagtcctgggctaaatgatccaccagccttggcctcccaaagtgctgggattacaggtgtgagccacaacgcctggccaatttatgtttttctagaaaactttatctcattcagattttcaatttactcttgtctgttcttggtaatctcttgattttaatatttactatctggttcctaatacattttattttgattctccttttctcttgctcattctcatgtttttttttttgtttgtttgtttgttttgtttttttttgagacagagtctcactctgttgcccaggcaagggtgcagtggtgcgatctcggctcactgtcagctccgccccccggggttcacgccattctcctgcctcagcctcccgagtagctgggactacaggcgcccgccaccatgcccggctaattttttgtatttttagtaaagacggggtttcactgtgttagccaggatggtcttgatctcccgacctcgtgatccgcctgcctcggcctcccaaagtgccaggattacaggcatgagccaccgcgcccagcctctcatgtttttttaaattcaaaccttttcttcagaaaaccagtttttggggccaggcgcagtgactcacgcctgtaatcccagcactttgggaggccaaggagggcacatcatctaaggttaggagttcgagaccaacctgtccaacatggtgaaaccccccaggcatgatggcgcacacctgtaattaattccagctacttgcgaggctgaggcaggagaatcgcttgagcttgggaagtggactccgtcttaaaattaaaaaaaacaacagcaacaaaaaaaatcagtttttggtattatgagaatagaaaagcacgtggttagacagtaagctttgaagccagattcccagctgggctactcgctagctgtgtaacatctgccaagttacttaacctctctgtgcttcactttttttctataaaatgataataatggcacatacatctcataaggctatttgaaacataaatgaattaatccattaaagcacttagaaaagtgactggtacatattaagtgctcaatgttaattactgtaattatcaatgctacaaattaaaaaaattttcacctattatttctttcgtctttactcagttctttttgtagtttatcatgttaaagtaataagatttattttcagtcctttattttaaaaaataaatgcaattggccgggtgcggtggctcaagcctgtaatctcgcactttgggaggccgaggcgggcggatcacgaggtcaggagatcgagaccatcctggctaacatggtgaaaccccgtctctactaaaaacacaaaaaattagccggactcggtggcgggcacctgtagtcccagctactcgggaggctgaggtaggagaatggcgtgaacccaggaggcggagtttgcagtgagccgagattgcgccactgcactccagcctgggcgacagagcaagactccgtctcaaaaaaaaaaaataaataaataaatgcaattaagtctacaaacttccctctaatgtattttcctgcatgaccataaaaaggacagaggagggagaaccgtgtctcactctttgagtcaagcaattatagcccaaagagcagtgtttagacggaaaacaaactgaaaaggagaaaaatgggatccctggaacagatgagggattcttagcctgtgtccttataaaaagctgtcaaaaaaggctaagtgtgagtcataaacattaaactactaatgtaaatcaagtgtaatttctatcttatacttccagggtccttcaagattatctgataagtaaaattaaagaatcagcacctaaattaaagtgctatacctaaaacaagaaactgaatcaaatgaaatgaagttaatgggaaaatgtgagatgcagcaaaactgagacaggtttatgacctgacagcaatgtgggtgaaaagagcaaggctgaatgtgagcagacctcatgtggagtatgatgtgcagtcttctataccccaactttcaaagagaccctgacaagctagagaagggcacacagggaagaggagaagggcagtcaggctgatgaagggacaacagtcagaatctctctccacagccaagaactacaaccatggcaggacatttcaggaagtacatgctgacaaatataaaggaagaactgtctaaaagacagagctgaccaacaaggaagtcaactatcttgcaaaatagcactttctccaccactgaagtcagaaacaaatactgtatggctatgtacaaggatgcctgttctgaactctggctaaatttggctgaatgaaaaaccacctgcacactgtccctagttctacattctgccacaggccagggcgaatgtcatgtcagcagagccactgctccacagactggcttaggaacctcaggagtcacagcctaagggattttcttttagagcctgaaaagttcatagtaaatacaaatactttccagctttatagttacctgagtttccacttagtcatacctgaaatcaagtgtggtaattaagtacacatgtaacagaaagggatgatctctagaaaagttgtagtaaacgcctttactgggtggaagcaactcagataaaatctgagttgttataacactcaagtttacatttttggggatcagacctaaataacctcttcaaaagggttttcagcagttatttcatcaataagaatgacagaattttggagaaacgtggctattagccattctctcagttgcataagtgaccctctgcagtaagccctcattcataagtctgggtagtttttacctaataacacagccaattcgcatcaaacctttgagaccagtttttccccccaagcttaacagcacactcaaataccttctcacacatgaattttctaacaccacacaaaattttcctctcacagtttatcttaagtaggaagaaggaagccaacaagtgcagccacttcctaaaaattttgatgtgctgagaaaatagttcctgtcagtcactccttggactggcctgtccagatgctcagcagacacctgtagcacggcttccttcactgactgtgaagaagaaaaggtacagtgttgcagctacacactgccaccaacacagtttgcattaccttgttcaaacttgaaatcaatgtaagaatactggttcatttgttttctcttcttcctttttccactggtttctggtgacagctcctgccattttttaatggcatcagacaaggcctaaaaattgagaaaaggaaaggttccttctgtaaatagaaaataagaatacacgagacaggcaatccctgaatgccattttaacacagtttcagctgtctacccagcatggctaacaattggtagtggcagctgggtgcggtggctgacgcctgtaatcccaacactttgggaggccaagtgggcagatcccttgaggtcaggagttcgacaccagtctggccaacatggtgaaaccctgtctgtactaaaaatacaaaaattagccgggcatggtggcgcacgcctgtaatcccagctactcaggaggctgcggcaggagaatcgcttgaacccaggaggcggaggtcgcagtgagccgagactgcaccactgcactgcaccactgcactccagcctgggcaaaaaaaaaaaaaaaaaaggaataggcagtggtaaaataaataggcagcatttctttattttcattttctctgactttcataaactggtacggtggtggaagcaaaacacttactgacagattaaagagtaactagggaaaagaaaaactgttggctgggtgcagtggctcacacctgtaatcctagcactgtgggaggatgacgggggtggatcacttgagcttaggtgttcaaggcttgcccgggcaacatggggacaccccgtctctactaaaaatacaaaaaaatagctgggcgtggtggtccacagctgtggtcccaggtactcggaggctaagataggacaatcacttgagcctgagaggcagggttgcagtgagccatgattgcgccactgcactccatcctgggtaacacaggagaccctgtctcaaacaaaacaaaactgtccaagctgtccttgaataagtacaggtaaaatcacatgacaatgggctggtgagtcccattctgtaggcaaatcttccatgttgtttctctggtcaatgctcctctttactctcccctaacctgcttcccccacactcttctctgtgtgcacctatatccaccccaccctgtaacaggatgctggagttcaaaatccttccactggtgaggatcccttttctttcctaccttcagcttctctctgttagatttcccttatcaggatttaaatgtgttcaaatcagggtgggcgcggtggctcacgcctgtaatcccagcactttgggaggccgaggcaggtggatcacctgaggtcaggtgttcaagaccagcctggacaacatggcaaaaccccgtctctagtaaaaatacaaaaaattagctggacgtggtagcaagcgcctgtaatcccagctacttggggggctaaggcatgagaatcagtgaacctggaaagcggaggttgcagtgagctgagatcgcgccactgcactccagcctaggcgacagagcgtgactctgtcttaaaaaaaaaaaaaaaaagtgctcaagtctttgccatcctaaaaacaggagggagaaggggtacctgatttgaaacggaaggaagggtgtgtgaggtaaggccattccgcctgcaagagaagaaggaagagtgggagcctttcaggaagactgggtgggactcctgactgtggcaggggataggaggccttggggctcatgtcctgtggctacgctgttagggtgcagggcaggctggggtcccagtctgggcagcaatgagaagcggggtggctatgatgcagtgtttgcctgaaactcctgctgaaacttaatccccagtgtggcggtgttgagaaggtgatctcatctctctttcaatgccagcccctctttcttcttcccctctttgtagagaaacttatcaaaggagctgtttatctgctgtttcaccacctcacccttatgaccacaagctttccagctgtctctaatttggcatctatcctgcctttgcacttactaatctatgcttattattgagtggccaagtctataagtctaccatctacattttagtcctcatcttgcacaaactcttagcagcatttaataacataggctgggcatggtggcaacccagtgctttaggaggtggaggtgggaggatagcctgaggccaggagttcaagaccagcctgcacaatctagcaagaccccatttctacaaaaaatgaaataaaaagatcatccaggtgtggtggcgtgcacctgtagtcctagctacatgggaggctgaggcaggaggatggcttgagcccaggtcaaggttgcaataagccacgattgggccactgtactccagcctgggtgagagagagagaccctgtttctaaacaagaataaccatgatgatgatgataataatacagactgctccagtctctcaacttcctccttcctgtctgcctgcctcctccgcttggtctttgcatgtcaggagtcctctcttctcacctggtatctctgggtacctcatcctggctggtgagattttccatatgctgatgactctcaaagtcctatcaccataaaacccaaggagattaaaaaaaaaaatcctatctacagtctgtattttccaaactttctagtccattcaacctcccaatgaattatttttactcagatgtctcacaggcccttctcagcacattggcaaccaacgtttcccagactgaattcgtgattatttctctccaaagcagatgtttatactagttctcaccccaataaatgatactaacatcttccacgacccctttcaccaaactcctatgtgggtctgtgattaaatgtcccttcctcagggtggcccttctggagacccttggtctaccttaggttgcctcccgttttaccctttcaaagcccctctatttttctttcagtctttttttttggccaggcacggtggctcatgtaggtaatcccagcactgtgggaggctgaggtgggcagatcatctgaggtcaggagttgctgaccagcttggccgaaatggtgaaaccccatctttactaaaaataccaaccaggcgcggtggtgagcacctacagtcccagctactcaggaggctgagacagaagaattgcttgaactggggaggcagaggctgcagtgagccgagattaggccactgcactccagcctgggcaacagagtgagactccgtctcaaaaaaaaaaagaaaaagaaaaagaaaaagaaaaggtggaaggggcttggcctagaccttagcatgagccacagtccttggcttggttcttcccttcctacaggtaagacccaatgagtattttaaccactacgataactccacgtttgtcctttggacaaaagaaacatcactgtgtttgctgagaatcacaagaatttcagtagaatacaatttaacggcagtaagagcgaccaagaggagtaagccaaggtctctgctggtgcgtgcgctcctgttctggccacagctacaaagcaggcactgtgtgctgtccttcatggaagacgcctgtgttacccaccacaaaccagcaccctcctcaccctcaaccaaggcctttaagtgccatctattttaggatcctgcggggagaacgctgggagctgtcagtagctgcccactctcttctgagggggcactgctgtgttcccggactctctacagaccttacgtcctatcactggtaactgagccacctgggggatggatggtcgtgtgacctgtcccaagttggaaagcaaatcaggaaggagcagcattagaatgcatctttcacactcctgcattccacagtagaaggtattacactccatgtttttacggtcaaagcagaacttctctgcttctcatctatctattatttcttttcatttagtccgtcacgatgagcaaatacccatctatttatcttcaccctaataaattccttagcaatcataaaccatcccaatttccacaagctgaactgttcattctgttaccatgggaagatgtagtcaagaggtgtgaccccaacaggaagaccaagtagagtacctttcgggtgattgcatagtgtcctttgagctcgtgcagggcccacttgatgtcctgactactgagcactttgaagtcggccatgaggaggtcagcagcttggatgaagcagcgctggtcaagaggggtcaatttagaatagtcaaaaaagtctattttaggcaactgaaatgagagagaagcataaaatcagaggccaggcagtacatttcccatacaggggaaatcattttaagaattacatgtgtagaaaagaataacatttgttctaattactctataaggaagttaccagccctataagacagatgagaaaacggtggctcagagaggttaaacaaacctgtctggagccgacagactagttttactactaaagaagtatagttggggatttaaaccaatcttacagccatcttctttccataccatatttacgaacaactattttttttctattacagaatacgtaagagagacagtcaaagaatctatggggagttggaagatcaagcaacagatcttaataaagttagttctcaaccatacttgaccatataacacactaaatgccagtttagatcacaaataatgacaatgattgaagtttttaaaaaccaaactgtttacatcttgatatgagatctggttaaacagatgtatagtatacgctgtatacaaatctcacatcaaaagaaaaaagatattccactctgggtaatgacctgcatgctgaagtacttagagggaagtgtactcatgtttttgcaatttactttgaaatgcattatcatgaaatgaaacataacaaagttgtgctgatggacagacagaggacatatgtatgataaagaggatacagtaaactgttaactagtaccagtggtaggtatataaatgatcaacgtaaaatatttcaatttttctgtaggtttgaaaattttcataataaaatgttaagagttttggccaattcttgttttgctttaggaatttgctttgtaggattaaagatatggagaattcgttcaattctttgtgggaaaaggaagataagaattacaaggaaagatagaagttaaagacagacagaattcaaagtggctcagactgggagatcgcactgaagtatagatatattctgaaatcctatgtccctcggctagtctttaaaaacttgtcccaacaaagcactttcttcccacagagataacaacaacaacaacaacaacaaagcacagcatttccaggcagtgactgcaaaacatgaacatgacacttgcctttgtctcatcttggctggccagcagactgctactgggatttataatgattctgtcttctctctttggataatctgggttttccagaagaaaattacaaagtctgcagaaacaaatgatgttactttcatactgcttccaaatcccacacctgcccattgcttcaaatgcaatggttgaagaatatagtccttagtcacacattacaactggcctatcaagaaattaagatgtttgtagcccagaaaaactaaaccaataaacaaacaactgcactgaatttctatctttgtgaaagacaaaaaaatttaaaaagcaatgaacatactgattaaggcaaactcctctgaagtttatgtatcaattgggtgttaatgtaatgaagtcactgaaactattattggttaaactacaaaactggaaaattttaagaaaagcagctactctttgtcgagaaaactatgaacaagtaagaagtggaaaactgtgtgttcacatttacagtaaaaaacagtctgctaagagatgtaataaatgaaatataaaagaccttctgttaattcattaatactttttatacccctgtggtaacataaatctctatggtaataataaagctctatgagccattgagttacacgtggtttatttagctagctgccaagctagactgatgaacagatcatgttttcctatgaacagactctcttcacacaaaacccactagctttgtctattatcaccatgaaatacttccaaagtaaggctatatagagtgagataacacacactgatgtatcaccacccagacccaacacatgttaactatccaggctcttcacagtcaaatcagacaaccaccttggaacaactgcacagtagtgcagacagagtgggtggggtacagctctagccacattcagtagcaaggaagcttctttgctcggagggtaatggggacttccccttttctctgttctttctcttgctccagtagatttctaagatgacctcctaggtgctatacctgcagttctcacacacttccctttctactggttctcttttgccagatgtcaatagtaaggcctgtaatagtagaacaggaggtctggcagaaagagggtagagaaaaagtgctcagctctgctccttttctcatccaggtgccagtgtttggggaccggtttggagaggttcattgattctgcagcccccgccggggacccacgtcaaagccttctccctcatcctgacatctcaatgcatttccctttgccgttacttcaggagtcccatatactcttcatctctaagctccccgcttccctaccaccacagcctgcccagtccacggaacacaacgcctgaggcccaaagagaggaaaaaaagcagcaaactcctcctattacagagggcgacaagaattcagagtacattttcctataaaaccattgtcatcagtggtaattctccatcctagaattcactggtgtgcactgaggttatgcaaacctttgaaggctgacctgagaattagccaccagcaaaaatcgcgtctgtagggaaaggcctgagttccagacaactcattacatgtgcatatttgatgtggcgacaaaccagacacggactagctttaaaatggtctgtttttacgtgttttctcaagtaaatgatacataaatacacctctacatgaaatacagatggaacagtagatatgatttcttgaaaaaacaaaacatgtttgagaggttcatctctccccaattcattttatatttgcaacaatattaagaacttcaaatactgaaatgctacagacatgaagttccacatgacagaaatcagaagctctcactataaactgtcaaaattcatttctagtttaatcccttcattatgtttaccaacacaactcttctggaggttaagtgacatttggaggcacagaaaatgaaggacaaagtttttcttctacagaaacaagtggtagcctctgttctaatatctgcaccctggggcaaaagcagtggggaagcctgtcggacttcaatctgcccacctcttcatatgacctcatgtttgagctgatctgacatgctagcagttctagagaagtcactcctgcaaagtaagccaggctagtactccaacctttcaacccttagatagttgttgctgccttcatccaactgaagctgaccacgtgtgagtgaaaggtctaagttaaccagccaaagtagattacctgccatgtggttctctaatgaataggcttcctgcttaaaatggccagacggttccatctgaaggccatttaaagatgcacataaagcaactgagactgagctacaacaaaatcccagcctgctcaactcagctttgggccttatttccagtttccattaacattttagtttagttgtggagttaacactgtcctaggagtccagagaataatggaaaggaaagcagtgtcaggaaaacaagactggcttgaaaagatgcaatacaatgactgtacattcccttgctttttggatttcacgagaattttaatgtgtttaaggatcagtgtttgtttctgagtgacacaaaaagcacagagggtcagcaagtccctaaaaataagtacacgtgtgagactcaggaagtaggagaacagaactgtaagagaaggtatcaatttgattacgttttagtgatttttctagacaatcttgaagatatatttaaacatgatgttcatttgcagaaggagagaaaaacattgaatatactcaatttctatgaggttaaactgttaaaaaatactaaaacatggtatctggtattcaaatcattgttctataaatgagctaagtttatacttttctctatcatttacattttctgtaatgaacaaacctgtattacatttcataaccaggaaaacattaaccaaaaaaaaaaaaaaaaggaattcaaagagaagagagaagtaaacaattcacacgcaagggaaatacaattagtaaacaaatatttgaaaaacacagccaattagcaaagaaatgtcacttatgctacttcatgcctactctagttaactacaaaaaataacatcataactcagtattgtcgaagagttgttaaagcaattcacacatataagttgctttttagatgagtagaagcctacaagaaagttttcattgtaaaaatgtagtcattgctgctcaattttcctataaacctaaaactgctctaaaaaaataaagcttagtaatttaaaaaaatgtagttattatcatgccacttagaaacccaaaaagaaagtattttaaaagcttaggaggggaaaaaaatctccaacaaacaattctgctggaagacacaaacatagccaataggaaggtggatgccagggtgtggggcaagtagagttcaggagacaagcaggagaatgttcacagctacattatttgtgacagtcagaactcaaatgcctatcaaaagtagatggaaaatttcattgctaagtggtataaatggaataccatttagcaatggaaaatatataaactgtggttctaccctacatgaataaacttaacataatgctgagtgaaaagaaatcagactcaaaagactatagactatacaaaatctttatgtagtgttcaaaaaggatagcaacgttctatttcttgaagatttctgggttgtggttacacaaatgtttggtttgtgataaattattgagctgtgcatctttactttgttcatttttctttatgtatattatattctataataaccaagtttaaaaactatacacaataaagaatatgtggaaaggcttcagaagagtgagtaactggcatgtaaataaccaaatggctttcaaggttaaatacccaggtagagtctgtcgttgaaaaataaaaaatgctttaagagtttgggtaatccaagccaggtgaggtaacacatgcctgtaatcccagctattcgggagactgaggcaggagaatcacctgaacctgggaggcgaaggttgcagtgagctgaaatcatgccactgcactccagcttgggcgacaagggcaaaactctctctcaaaataaataaataaataaataaataaataaataaataaataaaaggtttgcagggcatggtggctcacgtctcccagcactttgggaggctgagacagtgggataacttgaggtcaggagttcgagaccagcctggccaacatggtgaaaccctatctctactaaaaatacaaaaactagctgggcggtgggcacctgtaatccaagctactcaggaggctgaggcagaagaatcgctcgaacccagaagacggaggttgcagtgagccaggatcacgccactgcactccagcctgggcaagagagtgagacttcgtctcaaaaaaaataaataaataaaaaagagtttgtgtaatccaaaaacttcaagacaggagtctaaagtcgtttcaaactgacactgcccttggggacttgaaagaagcaaaagcaataatctctaaagaaaccaactctatcaagaactcaagatatgagcttagagtcaaatttagaaaatacacaagaaaactaggcaccatgggagccagcaggaagaacagaatatgattcccaagaacttaacatatcagaacaatcaaactcacagagaagctatgtttattggttaaagaaattaaaaaaagattaaaaatataggcaaagagcaaaactctaggaaaataaccaagacaattaaaagctaaaatttcataactgaaaaccagtaacacggtagatgagttaaaaggagattacactctactgaagagaaatttgtgggctaaaagaacacccctgaagaaatcatccagaacgcatctcagagacaaagaggtggacttagagacatggagattgtgggagaagagttacagaagacaggaaacagctacaaaatttccagaactgaccaacaccaccaatctatggcctggtagtgtacactcttaacggttttgccttactgacaagcatgttaagtaaaattgataaagattaagggaaggccaggtgcagtgggtcacacctgtaatcccagcactttgggaggccgaggcagatggatcacctgaggtcaggagttcaagaccagcctggccaacatagggaaactgtctctactaaaaacacaaaaattagccagacatgatggcgcatgcctgtaatcccagctacttgggaggctgaggcaggagaatcacttgaacctgggagatggaggctgcagtgagctgagatcacaccactgcactctagcctaggtgacagagtgagactccgtctcaaaaataaataaatagctctccctctccctgtccctgtccctgtccctctccccacagtctccctctgatgcccagccgaagctggactgtactgctgccatctctgctcactgcaacctccctgcctgattctcctgcctcagcctgccgagtgcctgtgattgcaggtgcgcgccgccacgcctgactggttttcgtatttttttttggtggagatggggtttcgctgtgttggccgggctggtctccagctcctaaccgggactgatctgccagcctcggcctcccgaggtgccgggattgcagatggagtctcgttcactcagtgctcagtgttgcccaggctgcagtgcagtggcgcgatctcggctcgctacaacctccacctcccagccgcctgccttggcctcccaaagtgccgagatttcagcctctgcccggccgccaccccgtctgggaagtgaggagcgtctctgcctggccgcccatcgtctgggatatgaggagcccctctgcccggctgcccagtctgggaagtgaggagcgcctcttcccggccaccatcccttctaggaagtgaggagcgtctctgccgggccacccatcatctgagacgtggggagcgcctctgccccgccgccccatctgggatgtgaggagcgcctctgccaggctgcgaccccatctgggaggtgagcagcgtctctgcccggccgccccgtctgagaagtgaggagcccctccgccccgcagccaccccatctgagaagtgaggagcccctccgcccggcagccgccccgtccgggaagtgaggagcccctccgcccggcagccgccccgtccgggaggtggggagcacctctgcccggctgccccttctgggaagtgaggagcccctctgcccggccgccaccccgtctgggaggtgttcccaacagcttattgagaacgggccatgatgacgatgacagctgtgtcgaatagaaaagggggaaatgtggggaaaagatagagaaatcagattgttgctgtgtctgtgtagaaagaagtagacataggagactccattttgttctgtactaagaaaaattcttccgccttgggatgctgttgatctattaccttacccccaacccagtgctctctgaaacatgtgctgtgtccactcagggttaaatggaataagggcggtgcaagatgtgctgtgttaaacacatgcttgaaggcagcatgcttgttaagagtcatcaccactccctaatctcaagtacccagggacacaaacactgcggaagaccccagggtcctctgcctaggaaaaccagagacctttgttcacttgtttatctgctgaccttccctccactattgtcctgtgaccctgcctaatccccctctgcgagaaacaaccaagaatgatcaattaaaaataataataataataataataataaataaataaatataaatctgatgacagtggttgcctctgtacagaggtgggatcagacaaggccactaatggctccaacagtgtcattgtacaaattagaaaaaagtacctacattgggctaagcacctggaaaggggcccttccttctcagccttggcagggaagaaactcacctgcaaccttgactgagaactacagtataagataggaactttggggaaaggtgtttagtgaactattttgtttaaatttaccaccaggctgagcacggtggcttatggctgtaatcccagcactttgagaggtggaggtgagcagatcatgaggtcagggtttcaagaccagcctgaccaacatgatgaaaccctgtctctactaaaaatacaaaaattagccggacagggtggagtacgcctgtaatgccagctactcaggagactgagcaggagaactgcttgaacctgggaggtggagactgctgtttaagccaagatcgcaccactgcactctagcctgggcaacagaataagactgtctccaaaaaaaaaaaaaaaaaaaaaaaaaaaaaattacaattatttcacctctgcagattagaaggaggggaaagagtatatttttcattttatattcttcaggaaaacttattttttaaaaaagcatatttaccacttataaaaaatttttttaaaataagagacaaggtcccactctggctcccaggctggagtgcagtagcgtaacacagctcactgcagccttgaattcctggactcaggcaatcctcttgcctcagcctcccaaagtgccagaattaaaggtgtgaaccatatgtctggcccgtatttatcccttttataatgaaaattaagaaatatggctgggagcggtggctcacacctgtaatcccagcactttgggaggccgaggcgggtggatcacgaggtcaggagatcgagaccatcctggctaacatggtgaaaccccatctctactaaaaatacacaaaattagccaggcgtgctggcaggcgcctgtagtcccagctactcgggaggctgaggcaggagaatggcctgaacctgggaggcggagcttgcagtgagccgagatcgcaccactggactccagtctgggagacagagtgagactccgtctcaaaaaaaaaaaaaaaaaaaaaaaaatgcttccatgtatttctccaaacagagtggttgcagaacattttgttacaatcgtagggaagaaaatgtcttaacatcttgactaaaacacaggtagtatcaacgcttagaaacaactcagttatcataattctataaccatgcagtattccataaaatccagaaaacagtctgtgtatcactaatgtcagaacgaacaaggtcattaaaaaagacataatgccaagtgaaataagccagtcagaaaagaacaaacacatgaggtccctgatagtagccaaatccatatagaaagaaagtaggatggtgggtgccactggcttgggaaggggatggggagtgagtgtttaatgcggacagagtttcagtttgagaagatgaaagagttctgaagatggatggtggtgatagttgcataataatgtgaatttacttaacaacaccaaattgtatatttaaaaatgattaaaatggtaaattttttattacatatattttaccaccaccaccaccaccacaaaaaaagcatggtagtatacttacacattcagatcataataattcttaaaatgaattatttcctcaataaacccatttgctacatctggaaatcttgcttcctagaaacaaataagaacataatttatatttcattcactagaatggtttcaaatggcaatacaagacagatggcaaaaagtataataaaatgactaaagactagaaaagggctgtgaagcaggtctgtgtgtgtcttcaaattcaacactagttcccagattcatctgtctacatagaagatgaggtctagaaaggtcttgagagatctggttctctgtccccattttacagatccattcttcattgcttcaacaaatattgagcatctctgtctagacaaagggaatccaaacacaaataagttacaatctcatgccagccctcaagcagcacacaacctagtgcctagataaaaacacctgggtggccgggtgcagtggctcatgcctataatcgaagcactttgggaggtcgaggcaggcggatcacctgaggtcaggagttcaaaaccagcctggccaacatggtgaaaccccgtctctactaaaaaaatacaaaaattagccagacgtggtggtatgtgcctgtgatcccagctactcgggaggcagagacagaagaatcgcttgaacccaggaggcggaggttgcagtgagctgagatcgcaccactgtaccccagcctgggtgacagagtgagactcggtctcaaaaaaaaaacaaaccaaaaacaaaacaaaaaaaacccgcctgggtaaagtagggttaacggacttgtttgaaggcaaatagtggctaccagatgtaacaccttttttttttttttttttttttttttttttttttttttgtgagatagagtctcactctgtcgcccaggctggagtgcagtggcacgatcctgactcactgcaagctctgcctcctgggttcacaccattctcctgcctcagcctcccaagaagttgggactacaggcgcccgccaccacgcccggctaatttttaatttttttagtagagacagggtttcaccgtgttagccaggatggtcttgatatcctgatcttgtgatccacccaccttggcctcccaaagtgctgggattacaggtgtgagccagcacgcccagcccttgtgttactcttaatatcaccactaatagaactttgttggatgacagaaacactgtcctccatgcttgatgatgaggtaagctgttagcctcatgtggctactaaggttaagatgtgactgatgccactggaaaattttatttaactgtaagacatttaaatgtaaacagccacaaggagctagtaagtgccatattggacagcataggtctaggtaattcaataaaactgctttaagggtttccatttggagtgaactcaaggaatttgaaaaaaacaagggactgcaggtatgacagcaccaggccaccatgatatgcagttagaatcccagagagcttcctgaaggttaagtatagtaaaggaaccctgattccattttcatgtcttcagagtgtctcttctattctgtacatctagatatatacttcttaggaaaatgaagtccacgcataccaacaacttttttttttgcaatgaaaaaaaaaaaagaaaaaaactcagtatatgtagtgtctacatttacttgataaaataaaacttaccgtttctttcactagtagttcaacgagctcttgatctacctctgcagcttcttgcccccaaatgttttccaaattgggctcttgagattcttgcattggaaaggctggacctggctcttcatcatcacttgctaactgctggtcttcaaactctcctagaggatgggcaggctgaggagaagaggggcctgaaatcccaccttgctggggttccggccttggaaaagcgggccctgggaattcatgctgaaacaacaagcggcccagttctgcttcaggctgccgttcctgaggaacgacctggtttgttatttcacggggctgttggttcagagactggaagtaaggatgatctaaccagcagtcttcttcgatggcctgatcatctgctagagcagctgactctcctagatttgataacagctctgtctctgagtcttcggatgactggttctgagtttccaaaggatcgctttctgtgtaaagaaggctaccttcttccaagatgatgactttctgctctgatctggggttgacaatgtcatttgctgcttggttatgactcggtccaggcttgggttctctttctgtttggccacttggcttagtgaattcagagattccaggaggcccaagatccagaaattcaccgtagtcatcctcagaatcatcctgtgccccagaatcaaacaatgggttgttacacactgaaaaatagctgctcttatctgattcaaatgctgctctagactttttaggcctttcttctcccaaccttttcagatcttgccactgggcagctggtttgatgagattgggtcgtgatctctgaggtttatttgtctaagaaaaaatgaaattttaataattcaatttctttcctatgcctatccctccttatgtacttatattgagcttccgagataggacaggaaagaaacaaaaacaccatctcccttaacaatacctattctttacatttatcttaacactgaaatttgattacactatatactatctgtaagaatcaaagtagtcattcatagattaaagcttgagatatagtttgaattataatttatttttatttttgagacacagttttcctctgctacccaggctggagtgcaatggtgcgatctcggctcactgcaacctctgcctcccgggctcaagcaactcttgtgcctcagcctcccaagtagctgggattacaaaaatgtgccaacatgtccagctaatttttgtgtttctaagagagatggggttttgccatgttggccacgctcgtctcaaactcctggcctcaagtgatccgcctccctcagcctcccaaagtgctgggattacaggcatgagccactgaacccagccctgaattataatttaacctgagactactaaaacaaaaataactccacagcagatacaacaatgaaagaatgctaacacatcagaagaataagaaatgttcaaaaaacatataaaaaaatctaaatctcattagtaactagcaaaatgaaaaattaaaacaagacagtatttttttccctgtaagaccggcaaacttttaaattagataataccaagcattggtgaggatggtgaaaaatctttttttttttttttttttttttttttgagacagagtctcgctctattgcccaggctggagtgcaatggcatgatctcagctcactccaacttctgcctcccaggttcaagcaattatcctgccacagcctcccgagtagctgggattataggcgcacacctctacatccagctaatttttctatttttgttagagacagggttttgccatgttggccaggctggtcttgaactcctgacctcagatgactggcccacctcagcctcccaaagtgctgggattacaggtgtggggcaccgcgcttggccgatgtgtgaaaattcttatactatcatttactgctggtgaatttaggagagaaatttggcactatttattaaaataaaaaacgtaggccaggcgtggtggctcatgcctgtaatcccagcattcagggaggccaaggcaggcggatcacgaggtcaggagatcgagaccatcctggccaacatggtgaaaatccgtctctactaaaaatacaaacatcagctggacatggtggcgtgtgcctgcaatcccagctactcgggaggctgacggagcagaattgcttgaaccagggagtcaagaggttgcagtgagccaagatggtaccacagcactccagcctggagacagagcaagactctgtctcaaataaataaataaatacacaaatacataaatataaataaaaaatgtatgtctgtcatcattttttcatactgttctataaactctatcgaaaaagggcatatacaagaatattcagcataaacagaaaaaagcctagagacattgtgaagtttgtccctgagtgaatggttaaataaactattacttatttgttctacaaaatactctacaactgacccctaccaaaaaaagaggtagctcagtctgtactgaaatgggaagcttcactaagaaatgccattaagtgaagaaaagcaagctgcaaaatcatacacagaatgattccatttacttaaaatatgtcaataagacacaaacaaaatcatttctaaaagtatgtatatgtacccacatgtatatacacatggatacatacaaattcaaagaaaagacctggaaggatacatgctaaactggtaacaacagttcctctgggaagtccctagaagaaaggagatggtgaatctcaggctttagggtgggtccctgaggactatgccactgaagtaagggccaagctggaaataccctggacctcccaggaactgaatcgcagcgtggagagtttaactccctgaatgtgaggtgctggtgctcttactcttcttcaagaaaccaattaagatcctctatagagaaacaacatcatacagaatcccaaaattttcatatacaatgacttacactcaatcaaaaataactaggcatacaagaacttaatgcagcaacagaaaatcaaaacaagagaagtaacagacaacagaaacaaatatacaagggtttcacacagtgaaattaacaacatgaattctaaagtaacagcatgtttagggaaatcaaagactagattgagaactgcagccaagaagaagaagaatcgaacgcaaattccagaatggaaaaatacaataactaatacaaaaactaaaaatacaataactaatgctacatatggatatatagcattttaagtaaatacagttgaagagagaaattagtgcattgaaagccaggtcagaatagccatagtaaggcatagacaaaatgcaacattagataagagaacacgtcaagaacaaaaaggtcttcaaaacacataactggagttgtagaagagaagaagctgtttctttggtagaggaggaggaaggaaaacaagggagggaagggaaggagggggacacataatggttagttcaaataaccattcgaactaaataagggaaaaaacataaggagtcacagattaagacaaagtagaacaacagtctgttttgtttaattctatagaatatattcaaaacctcaaagaatacattggttctgaagactctacaaaacaaacaaacaaacaaaaaacaaccctcgaagaaataaagaaaacttctggctaggcacggttggcttatgcctataatcccagcactttgggagcctgaggcagatggatcacctgaggtcagaagtttgagaccagcctgaccaacatggtgaaaccccatctctactaaaactacaaaattagctgggagtggtagcgcatgcctgtaatcccagttatttgggaggctgaggcagcagaatcacttgaacctgggaggcagaggttgcagtgagccaagatcgcgccattgcactccagcctgggtgacagagcaaaactcccatctccaaaaagaaaaaaaaaaaagaaaacttctaaactttttatgaagtcagaatcatgcttataaaaaaataaacatgtcaaggatatcatacgtacacacaaacctacgggccaatctccacctgtaagatctacggagaaaacactaatattagcaaatggaatccccagcagcacattactactacattacaatgccacaaccaaggggagtcttttcaaagacaataacttaccaactaagaggtcaaggaagaaaaaccacatgacaatctctgtaagatgctgaaattgaatgtaacagaatcctacattcacttctaaaaaaatttttttaagtcaaagtaaatgactagttccttaacataactaaagaaatggtatctaaagcaaaaaggcaccatcacatttaatgaagaaacattaagtattcccatttatgtctgtggccattcgtgctcttctctatcaacactattaaaatttttgaggaagtaccgtaatataattagacacgtgaaagaagcataaaaattggaaagacagatcagatgcacgttttcaagaaattaagagtcaactgaaaaatcactacagataataatggtaaggtgattgagtataaaattaatgtaaaaagcaacaagggcagggcacggtggctcacgcctgtaatctcagcactttgggaggctgaggtgggtggataacttgaggtcaagagttagagaccagcctgaccaacatggtgaaaccccatctctactaaaaacacaaaaatcagccgggtgtggtggcacacacctgtaatcccagctactctcgggaggctgaggcaggataattgcttaaactcgggatgttgcagtgagccgagatcaggccactgcactccagcctgggtgatagattgagactgtcttaaaaaaaaaaaaaaaaaaagagcaacgagaacacttactctccattttggaatgaagcattgcctgatgctagactcacaataaagacagttgagatccttacactaaatttgttgtaattttgtcctttgacaggtctggcaacccaaagggacagagactgttgatatcttgaggtaactcaaggaacacaggaaaaacggctaactcccttttttgggaagtaacgttttcctcatggagctgcaagtgtcggaagtccttctcaggtctgagctctgctgtctttttagcacctggtctctttgactttgagggtaccaaggttaggctgcactgtgagagagcatttgactttgcagtacctagggttaatctgggctatggcagggcacaggacttttgggaatgtgggggctcacaaatcactggcaataactgtattttttgctccctctttgcagaggtctttacggcttgagtcaagcccccaagattatggccagacagaaatgtgggtgcaactccatttgctgctagcatacaggggtgcagttttaaagctaactgataccagctgtgttgagtgcagggagggtataaactcaggcttttggaatctgtgggtatgtggattccttttcttgcaggcttaggtgagggaggcctcaggtgtcttgactgagtcagatggaaactgcaaagtgattggctaggtaggacatcttggagccaacgtcatcccggtcctgagatatacaaggtccaacataaaaacagcatccctaatttctaaaaattggagtactctgccttctggtagtcttgccttttcatgtataaaacttctggctccagaagctacaaatagttacacaagtggcaaaactttaccaaaaataattcagaattatgatgaccatgatgtggaatgttccagatgaaaaagagtgttcatccaagaaattcacttgaatcctaagactccaaattacacggagagaacgagattcttactggcattcagaagcctcaaagagacaacagaattctaaaatagcttttttgaaagattaactgcaaaaagctaatgaaaaactagaaacgcaagattacctcccacaccaaagacagataaactaatgtaactcctactgctcccattttacctgaatactgcatctactcctgaatattcacagtctactaactctgagttgcctttcttctctgaaaagaacagttcaactgtttccttataaaacagaacaacctgaaaatgtagcatgaaattcctgacttacatgctacggataaaaacaggtcatagtttaaaaatgtcctaaacctggggaagactttcagacattttttaaagaattcagagtcttaattataacttatgatcctaggatacctgacttattaccagctaacacatggtgggaccaggggaaggagagggagtaaaaacggataaaagcagcagaagcagaatattattttcctgaggatgatattcaggacctgacaagtactatccagtctacttatgggccaggcaaagcctgaaatatcagacgtgacccttagaaagccatttccaaaatgtttcagctctacggtgttatctgaaagcaaaatagatgcccctttataaactaagacagatcctaaggttttgtctgttttttaaaaattagagacaaaggtcatgcacggtggcacacacctgtaatcctagctactctggaggctgaggcacaagaatcactaaacctgggacgtgcatgttgcagtgagtcaagattgcaccactgcatcctggcctgggcaacaggagactccatctcaaaaaaaaaaaaaaaaaaaaaaaaaaaaaggggaaaaaaaaagaaaaaataaataataactagatacaaggtcccaggctgaagtatagtggcacaatcatagctcactacagccttgaattcctgagctcaagtgatcctcctgctaggcctctcaaaggactgagattacaggttttgagccactgtgtctgccctgacccttaaggttaaggaaacaaaaatcacctatgaggtcagggttcagggtgactggtatagcaactccctaaattcctatgctccaagaaaaatcaaactgttgctaagctccataccaataggcggtatcaggcaaatatcagacccctccctaactctgatttacaacccagaaacccactacaactcttaacacagacagaggactggccttacaaacatcgttttctgatgaactactacatatagatcttaaaccagtttctgccagcttatagaggctgcacacaaactgtctttgtgccctacagttcaccttttgaaggaaaaagccaaattccacctcattttaatgctgaaactctaccccagggaagctctggttagtctttggcagtcctgaagtcagtaactcattaagaaacaagctaaattccaagtagctgggattataggtgctcaccaccatgcccagctaatttttgtatttttagtagagacggggtttcaccatcttggccagactggtcttgaactcttggccttggcctcccaaagtgctgggattataggcgtgagccaccgtgtccagtttctttatgattttcttaacctttcctcagcttactttattataagaatgcagtatattttttatatacatacacacacacacacacacacacacacacacacacacacacacacacataatatactaactaaagcatgttaaccatgttattggtcaacagtatgctattagtagttaagtagttattaagtagtactaagtagttaaggctttggtcaacagtatgctattagtacttaagtttttggggagtcaaaagttatatgcagattttaaactgcacaggggttggcacccctaaccaccatgttgttcaagtgtaaactgtatttgaaaactggcaaataaagaattttaacgaaggctataagatctgcttctctgtgtctccgtgtctatatatgcgttatgtgtgtgtggtatttctctaccaaaatatatgagagaactctgataatcggtttaaggaaaaaggaagcacttcaatcttttatcagaaaaacaggacctaactccaatgccttttagttcacgtgacttaggtatttttggtaagtaagaccatttggaaaacagctgtgttctgatcagcaaaaatgcccatgtatttttttttttttttttttgagacagggtctccctctgtcatacaggctagagtgcagtggcgtgatcttggctcactgcaacctccatctcctgggtttaagcgattctactgcctcagcctcctgagtagctggaattacaggcacgtgccaccatgcctggttaatttttgtatttttagtagagacgaggtttcaccatgttggccaggctggtctcgaactcctgacctcaagtaatccactcgcctcggcctcccaaagtgctgggattacaggcgtgagccaccacgtcgggcctatatggatgttttttatattccaagattagataaagttcctagaaatctgatatgtcttggtataaatgctatcagtcataattttggttcagaaataactaaatttccttgtcaactgtgtcattataatgaactctcatcaggtttttaaccacagccattttaagtcttgctgtccacagttattttgttctgacactttctgaaagctctttgcaagcaattataatcctaaagtgctgtgtgttcaaagatgtatatgcgaaaaatgaaacgaactctgacaaatacaagtttgagttcgtactatcggactaaatatccaaaattctaatgaagaaactaatggatttgtgtaactgctaaccaagatcaaacagcaaaaattaattacatgagactgaattgataaaagaagaatcatgggtttttatggcttctttatttgaaacactgctggttcttttaatgttttgttttccagatttaaggaaacttttttcttttaaggttattatagcttatagcaatttggtatacttttataataaaaataaaaatatttgcttttcctcccaacaggatccctccagaatttgcaaactattcatgagtattcttatttttatggcaatatcattatttgcatatctgtccttttaataaaaggacacaactggaaactggttatgttaccaaggctttgactggaatgccatatttcaaaatgtgcaaacaatgcctggctttaagcattccctgtcttacagtgagtaaatctgtctcttcctggcaggctcaggaacctccagatgctggatacagcacacaaagactaatgtctgccctggtttggtttcctagcagagacattttttaaagaccaatttgagattcctcatcaaaatttccagcaaagcaaatttaaatatgtgctttcaaatatgtggttagtcaggcaaactggtcttactgtgattatctttggtagaaatgggagtgacttagagaggaaaattacatttcaaaagaaaactccagtatgcctgttatttagattgcagcactgttcactgagtttttattatctacctgttagatagcaggaacctgcttagttcctgaagccctataagctgaagctggacaaatctacgcaaatcgcaaggaataagtctcatgcctaatgcatgggccacacagagttcactaggatggccaatgccacaaccagagacattcacaacagcaaaccacattggagcaagactccccctcataaatgtgagactcttactctccttaatctttccttacttatgcctctcacgtggcaggacaacgttgcagtgaaaatttcaccatcagtagtagcctctgcagataacctgcactccccgctttaatttaacccagtcatgggatgcgagattacctactaactcaacagagaagattctgtgcagttgatggcgcttcttgcttgcacacagataaaacacagcaagtattgcagagcagactacttggttaaaacaaggtagactccttgtctagctatttggttttagttggggccctagccgaggagcagcctccacccaaactctgggtattaccctccttagagtcctaacggcagtctccttggtgtgctgtgcaccctcagaaagttttaaatgtttccatacagctacctgtcaaatgccaaatggtctttctccagctggaacaacaacaacaaaaaaaagtgtgataatgaggacaccagaacctataaagtatatgctgggaccagaaacccaaaatgatggtaactgagagtggcactgatgcccgaaggtttggtcaggtcctgggtgaaagcctaacaaaaagggaggaattgttaaataaaaattataggaggccactgttttggactaagtgtgtgcactagaccccaaaagaccagactaaaactcaaaacggaagcatccatgtaagtttcatactaccaaacctaaacctgggaagttcatttgatcttcctagaaattgaaagaaagagtgaacaaccagtttcttaaacagggcagtttaaatcttcattgggaatcataatgaatttccctctgctttaattcttacacaggaaaggtggcctgaagcagcctgatgttaactcatcagttatttttctcttttctgtctccctgtcccagcctgacaagaaaagtaactttgaaaggactttgcttctgctctcttcagcccttctttgtctataaagccaaccacttctcctcagctcagtggaacacctactgaattttatggaaggaagtgttccttggtcctagaaccacaataaagccaactgggatctttaaactaaaaaaaaaaaaaaaaaaaaaaaaaaaaagcaacagatttgtagtttaaaaaaaacagtttaaaaagtacaatgaaagggccaggcatagtggctcacgcctataatctcagcactttgggaggctgaggggggcggatcacgaggtcaggagttcaagaccagcctggccaagatagttaaacctatctctgctaaaaatacaaaaattagccaggcctggtggcgggcgcctgtaatcccagctactcaggaggctgaggcaggagaattgcttgaaaccagaaggcggaggttgcagtgagccaagatcgcgccactgcactccagtctgggaaaagagcaaaactccgtctcaaaaaaataaaaaaaatgaaagtacaatgaaagaaaagatgtcagtcacaaaagcaacagaaaatataaaataaccaagaaaaacaaaaaatgcttaagatctatattaagaaaaattcaaaatgctttctggctgaggaatattaaagtagccttgactatatgaaaagacaaaatttgttcttggttagaaagagtagtatcataaaaattgctctataaatataacaggaagatttgttttggattacgcaaactgattatatatatatctttatattttggaactaaagaagttgattgtaaaatccatataaaaatttaagtgcaagaatatccaggatgattctgaaaaaatgtgggataatatggaaaatataaggccaatccaacagtaagatacactataatgttgtagcaatgacaacagtggaatttggtgcgttaatagtcagatggaacaatggtgcagatattcaatccagaaacagactgaaacatacagcttctaaatctaagagtacacgaggtagaatggaaaaggggctgttctcagaacgagtacaagaggtgctgttctacaacaaggcccacaagagtggctgaaaaatcagatcaccaacttgcaataatgtctcattgtaagtttaaagaaaactcacttctgtcaggatgacatcatcatccaggtcctcttcttcatgctgctgaggagctggggtgaccagcattggaatcctttcctcatctgaggagtcagatatggtgatgggcccatctcggagattgatccactctacaggaaagcagagaacactgttactgggaggttggcactatcacatccaactctttaagtttttcctgacaggggtacagcctaaagccaacttcatggctactagtgtaacgtacctcctcaagcagcccgtgcacttaagcattaagagccatgtttctatgctgacttttgccaataacacattttgggaactgctagagaacatctaacaattactatgctcaagattatcaactttttctcatactaggttggagaaatctgtttacaaaattttcttgactgccaatttctttaaagtgaaataatggtctcccaatccatctctattcctcctgggaataaatgtctattttatttaaattgtttggtctgaaaaaattatcattcaaaaaatagtaaaattttaattgtttaaaatattgaaatttgctcatcttaaacacaaactttaagaatcatttaagcaaacctatgtcaatgctttagtcaagcacccatttagcatctatgacagtcagcaatttaactttccaagtttcctttaaaatatatataatctaaccatctaaatgtagtaattctattcaaggtttttacttccttttatcaatttgaaaacaggccatgtttgatatgaattactgggtaacacaaactggtattttttcctgtctagttccatgggaatatcaaaggttaagagggacaattttaaaaaaaagcattggccgggagcagtggctcacgcctgtaatcccagcactttgggaggccgaggtgggtggatcatgaggtcaggagtttgagaccagccagacgaacacggtgaaacaccgtctctactaaaaatacaaaaattagccatgcgtggtggcgcatgcctgtaatcccagctattcaggaggctgaggcaggagaatcgtttgaactcgggaggcagaggttgcagtgagctgagatcgcaacactgcactctagcctgggtgacagagtgagaccccatctcaaattttaaaaaaaatgcattaagtgacctaaaagaagagaagaagaaagaaacgaaatgacgcacctcatcactgcaatttttgaaattcttccattaaagctgtaatgtttttcttttgtgtggtgtgtgtgtgtgtgtgtgtgtgtgtgtgtgtgtgtgtgtgtgcgcatttgtctgggacagggtcttgctctattgcccagactgcagtacaatggtgcgatcatagctcactgcagcttcaacctcctaggctcaagcaatcctcccatgtcagcttcccaagtagctaggacaacaggtgcacactactttgaacagttacttaaaaaaaaaatttttttttgtagagatggagtctcactatgttcctatgctggccttgaactcctggcctcaagtgctcctcccacctcggcctcccaagaagtcactgggatgacaggcatgagccaccatgcctgacttaattgtggatttttaaggatgaggagttgccaagctcctcacttagccatttcagaagacacacgctatgggggatcattctgaagagatactgagcaaagaaaagctctagccattggtacatgaggcacaggagtcaagagagaaaatgtacaccactgaaaatggccatagtgaataagacccctgcacccgcaggaaattgtagattcctctcttgaagaactgacccaagaaaaagacacacaatcttggtgtacccaatgaaaaagttggtttaggctgggcacggtggctcacgcctgtaatcccagaactttgggaggcctagacaggcagatcacttgaggccaggagttcgagacgagcctggccaacatggtaaaaccccatctctactacaaatacaaaaattagccgggtgtggtggcatgcaactgtaatcccagctacctgggagactgaggcaggagaatcgctttaacctgggagatggaggctgcagtaagccaagatcatgccactgcactccagcctgggtgctagagcaagaccctatctcaggctaaaaaaaaaaaaggaaacaagggagggagggagggaactgaaggaaaggaaggaaaggagaagagaggaggaaaggaaggaaaggaaggaaaggaaagagggagggaggaaggaaagaaggaaggagaaaggaaggaaagagaggaaaggaagaaggaaggaaggaagggagggaaggaagaaaggaaggaagggagggaaggatgaaaggaaggaaggaaggaaggaaggaaggaacctatcaccttataataaagtccagtgtttgacaagataccacacaacacaccacatgtaaggttccaattagcttttcaaagtatacttaaaaaaaaattgaaagaataacacagcatggtctataaatcaagtgtacaagctctatgaattaatacaaagggccatctgtgtataatcaccaccacaaggtcaggaaatatttctagcacattagtagcccccttgtgctttctcccaatttctgctctccttcgtcctcaaagggaggatttctaattgcgcagataagttttgcatgtttttgagtatatattcttctctttcttgcaaataatgtttgagatacatccatactgcatgctgttataattctttcttgtatataatccactatatgaatataacataaaattattccttcttctgttgatagacatttgagtatgtggcagtttaggctactgtggatagtgctattgtgaacattcttgtgcaagtctttggtgtactcattttagctggatacattctaggagtggaaatgctgagtcatggggtaagcatatgctccattttggcagataacactaaacaaattttccaaattgtaccaatttacactcccatctgcagtgtaggatagtacgttgcttcacgtccttatgggaacacaatcatgctcattcatttatatactgtctatagattgatatggtttggctgtgtccccaccaaaaatctcatcttgaattgtaatcccataatccccacaagtcacgagcgggacaggtggaggtaatcggatcatgggggcagtttcccccattctgctctcgtgatagtgagtgagtcttgaggtgtccgatggttttatatgcactggcatttcccctgcttgcactcactccatcctgcctcctgagaaggtgcctgcttctcctttgcctttcgccatgacagtaattttcctgaggccttcccagcaatatggaactgtgagtcaattaaacctctttccgtcataaattacccagtctcaggcatttcttcctagcagtgtgaaagcagactaatacagttgctttcatgctacaatggtatagctgaatagttgcaacagaaaccatatggcccgcgaggctaaaatattaactacttagctcttcaaatttgctgagccctagttatcttggttccctgcaacctccacctcctgggttcaagcgattctcaggcctcagcctcctgagtagctgggattacaggcttccaacaccatgcccggctaatttttgtatttttagtagagatggggtttccccatgttggctaggctgggtttgtttttgttttgttttttgtttttgcgacagggtcgctctctgttgcccaggctagagtacaatagcatgaacacaagttctctgcagccttgacctactactgggttcaagtgaccctcccatcttggtatcccaagtacctgggacctggtaaacccaagaccaccatacccagctaaattttttatatttaattttttgcagacatgagaatctcaccatgtcgcccaggctggcctcgaaatcctaggctcaagttatcctcccactttggccttccaaagtgctggcattacaagcatgagccactgcgcctggctgagctttttacttcttgtctaatgtattttaggccataagttttcctcaaaacatggcattacatgtatctcataaatgtaataggctacattttcattatcatgtaattcaaaatatcttctaattttcattgtgatttcttctcacactgggtgcagaatcccacctatgtttattacatttgttgaccatgttcttccaatcttctatattcatacaagtgtgtgtatgtgcttgttctttcagttactgaaacaagtcttaaaaatccccactataatggtggatttgtccaattctgtttttagatctgccaatttttgctttgtatattttcctatcatgttactaagtatacagggattagcttatcttctcagtgcactgaatcttttatcattatgaactctatcaatgcttctggctggagtttctatcagttgtatttgatattacacagatatatcagctctttttgtgtgtgtgtgtggctatctgcatgatgtaccttttttccttcctaacaaaatttttttaaatctttattttaccttcatttttaagcctattttcactaggtacagaatcgtagatgagtaggtaaaaacactatttagcaattaaaaaggaatgagttactgatatatgcaacaacagggatgaatctcaaaaacattacctttcacaaaagaattccagtacaaagaatatatacagtatgtataattccatttatatgaaatgacagagtcaaaaaaagcagattagtggtttccttaggcctggagtgaggtaaggactaactgcaaagaggcacaagggaatctttttggagtgatagaaaatgttccatatcataattcaggtggtatattcattttatacacttttaacaaaactacagaggttgatgcataataaaaaattattaatgttggccaggagcagtggctcacacctgtaatcctagcacttcgtgaggcagaggcaattggatcacttgagcccagcagttcaagaccagccttgccaggcaacatagtgagaccctctcttgattaaagaaaaaaaaattaatgcagctaataaaaacaaaactctatatacctgaaaaaagttctcatgatgggtgcagagtatacatactcgtctaacaaaatatatctccaaagtcagtaattttccaaaatgaattagttgttcttaaagaaactgttcaagtatatttaagatccaattaaaaaacaactataaaattaattggatatacatgtacagaaaattttgaaatgatcgtaaatacaagttataactaagatttaaaattgcctgaatccaataaattatggctacaatcactaccaagttagaatacattattaataaaatcctaaaaatgagtcctccttttgcactcataatgtgcatagcttgagcaattttattactcttgatttgacctaataaaatttgctcaattttaaatgctctgaaagccaaatacacagttgactcttgagcaacactgatttcaacagtgtgggtccccttatttgcagattttcttccacttgtgtcactcctgagacagcaggactgcacgagactttcaggagcctatcccttgcaccagtgtgccatgaatgtgagatgtggagtcaaaggaggttattttggacctttaagatttaatgaccgccctgctgggttttggacttgtgtgggacctcttgcgtctttcttttggccaatttctcccttttggaacaggagtatatacgcaatgcatgtacccccatagtatcttgggaataattaacttgtttttgactttacaggctcataggtggaagggactagacttgtcacagataagactggacttttgagttaatgctagaatgagttaagactttggggactgttgggaagacgcaattgtatttagcaatgtgagaaggacaagagacttgggaggggctggggtggaatagtatggtttggatctgtgtccctgcccaaatttcatattcaactgtaaaccccaatgttggagatgcggcctggtgggaggtaattggatcatgggggtggtatttcataaatgatttagcacaatccgttctggttgcaacagtgagttcttgtgagatctggttgtttaaaagtgtgtggcacctcttccccaacccctcttgttcctgctccagccatgtgagacaagcgtgcttccccttttccttctgtcatgattgtaagtttcctaaggcctcccccagaagcagaggccgctatgtttcctatacagcctacagaattgtgaaccaattaaacctcttttctttctttacaaattacccagtcttgggcatttctttacagccagtggagaacgaactaatacaatgaccaacccctcttcttcctcctcctcttcagcctactcaatgtgaggatgatgaagatgaagacctttagaatggtccacttccacttaaggaacagtaaatatattttctttctcttccttatgattttcttaatcacacttcttttctgtagctcactttattgtaagaatacagtatacaaaacatacaatatataacgcatgtgttgactgtttatgttatcagtaaggcttccagtcaacagtaggctattcgtacttaagttttggtggagtcatttttcttcttttttttttttttttgagacggagtcttgccctgtcgcccaggctggagtgcagtggcacaatctcagctcactacaacctctgcctcccaggttcaagtgattctcctgcctcagcctcccaagtagctgggactacaggcatgcaccaccacgcccagctaatttttgtattttttagtagagatgggatttcaccatgttggtcaggctggtctcgaactcctgacctcgtgatccacccgcctcggtctcccaaagtgctgggattacaggagtgagccaccacgcctggcctgggggagtcatttttgtaaggtcaaatgtaatttactctctactagaaaaatcatctttgtaaacacaaaatattatcaatgggagaaaaccagtataacctcttccatggaatttataattgcaaaaaatgaacgtaaggattctacacctcagcatgatttttttccttttagcccaagtgtaaatgtgaattcgaatttaacaggaaatttcacaaacatgtaagaatgttacagaaatgcaagcactattccctttacaaatcaataaaattccccaaaactttaaaaactgtagaacagtctgggtgcagtggctcacgcctgtaatcccagcactttggcaggctgaggcgggcggatcacctgaggtggagagatcaagactagcctgaacaacgtggagaaaccccatctctactaaaaatacaaaattagcagggcgtagtggcacatgcctgtaatcccagctactcaggaggctcagaccggagaatcatttgaacccaggaggcggagctcgtggtgagtcgagattacgccattgcactctggcctgggcaatgagtaaaattccatctcaaaaaaagaaaaaaaaaaaacaaaacaaaactgtagaacaaaaaaatacatgttccaaaattcccctcaaggctaagccagaatcttctggcaaaaaagaaattaagcatcatgggaagacaagactggttcagcaacacctgcagtatttcagaacataaaggcctagtggagcactcctttataatcaccacgccttcaaaaactgatgctgacactgtctcttaagactcaatgactgcatattaacagcgtcttgccagcaaattaatagcttattaatccatttgtaatgaatgagtcttacacttcattcatgccagcaatatcattatctgatataattctagtctaactagtctttttgtcaaaaacgaaatgtccctggattctaaatggtacaaaataggttcatttcaaaagatacagctgtgatactaaaagaaaaagccacagggaaagggatgaagtgagaacaaacaacttaccttgtccccgatggcagtgaaagttgttcaagtgaattacctcttcattgttgtttccctcttccattttcaaatgcagacatgcatatatgggactgctaatatctaaacatggtgaccatctgtttcaaaagaactgaaaaggaagcaaagagtaacagtaagaatgagggagtatcaaaactcttgccatgtatctggtcaggggaacatctgaagcttatgctgaaaacattccttaagaaaacatatccaaggaggtgggtcaaaaaaaaaaaaaaccacacaaactcaaaacctatgacattaaaacatatttttaaaatacacatattaaagagacaaagtactgacagagaaatgacatcttgatacaaatatgctaacaaagaaatgggctaagggtattaacaggcaattcaattcacaaaaaagaaaacacagaagatgctcaacctcactaataatcagggaaaggcaaatcagaaaatgaattatgtttcagccagacgcagtggctcacgcctacaatcccagcactttgggaggccgaggcgggcaggtcatgaggttaggagtttgagaccagtctgaccaacatggtgaaatgccaactctactaaaaatacaaaaattagctgggcgtggtggcacgtgcctgtaatcccagctactctggacactgaggcaggagaatcgcttgaacccgggaggctgaagttgcagtgagccaagatcgtggcactgcactccagcctgggcaacagagtgagactccgtcacaaaaaaaaaaaaaaggaattatgtttcaaaccactggggtggcaaaaaaggcaagtatgtaagacatgggaaatcatcttatacattgctggtttgaagagtaacttggaaaagatattctgaatagcaattagcaatacgccctaaattacaaatgtacattccctgtgacttagcaattccacttccaggtatatcagctaaagaaacctctgtgtgttctccaagaaatacgcataatagaatatacggacagggatggtcattatagcaaatatgtaataaaagcaattggaaatgaccttattggacatcagtaaaggaataaataaaattcatatgatacaacacagttaaattaactaatgttaaatgaaaataagtgtgataccatttatgtaagttaatacaaaaatttaaaatacattaaatttaaatattaaattaaaaaatacagccaggcgtggtggctcacacctgtaatcccagctcttagggaggctgaggtggatggatcacctaaggtgaggagtttgagaccagcctggccaacatggtgaaaccccatctctattaaaaacacacacacaggctgggtgcggtggctcaagcctgtaatcccagcactttgggaggctgagataggcggatcatgaggtcaggagattgagaccatcctggccaacacggtgaaaccccatctctactaaaaatttaaaaaataataataaataaataaataataaaaatacaaaaattagcagggtgtggtgacgggcacctgatatcccagctagtcaggaagctaaggcaggagaatggcatgaacccgggaggcagaggttgcagtgagccgagatcacaccactgcactccagcttgcatgacagagcgagactctgtctcgaaaacaaacaaacaaacaaaaaaaaaattaaaaatacagtatgcgtaagaatgacctcagcaacttcaggacagtgactatttctgggtaagggagaatgaaaaggaacttgaacttgagttacatataacatcttttttctttcttttaaagatatttaaagcaaacaagacaaaacatgaacatatgttaaatctgggtagcagagtggggtagtagacttgtatttttgtaatccatccctctcttcctttaaaaagaagtatcatggtgttaaagccaagacattacatctccatggaccagcaatggaacagaaacacagaagttattgatggggccaaagcagcagaactactgaactctggggataggaaacagagaaatatttgggaaatggactcatatgagagtaatggggacaaaaaaaacaacaacccatgtctattatggaaggagaaaaggtgggtaccaatgagggagtgggtagattaactgttaagtgacatgagggaacctttccgggttaagtcacactccacatattgattgtggtggtagtcacctgggtatatgcatttgtcaaaactcactgaactatatactaaaatggatggattttattttaattatatatcaataaagatttctttgagggctaggagcgatggctcacacctgtaatcccagcactttgagaggctgaggagggcagatcatttgaggtcaggagtttgatactagccgggccaacgtggtgaaacccatttctactaaaaatataaaaattagccaggcgtggtggcaggcacctgtaatcccaggtacttggaaggctgaggcaggagaataacttgaacccagtaggaggaggttgtagtcttttttatttctttttgagccagtctctctctgtcatcctggctggagagcagctacacgatcacggctcactacagccttgaacccctgggctcaagcaatcctcctgcctcagcctcagagtagctgggaccacaggcatgcaccaccatgcctagctgaatttttaaaatttttttgtagagacagggtctcactatgctgcccaggctggtttggatatcccggtctcaagcattccttctgccttggcttcccaaagtgctgcgattacaggtgtgaaccaccaagcccagcctgtatcaataaagattttaaaaaataaaacagacggcagggcacgacagctcatggctgtaatctaagcaccttgggaggccgaggcaggcggatcactcgaggtcaggagtttgagaccagcctggccaacatgggcgaaaccctgcttctactaaaaatacaagaaattatccagatgtggtggcaggtgcctgtaatcccagctacttgggaggctgaggcaggagaattgcttcaaccagggaggcagaggttgtagagtaagctgagatcacgccattgcactccaggttgggagacaagagcaaaactctatctcaaaagaataaactaattaaaaaaaaaaaaaaacagataagtatccattcaaaccagcaatggtgtggtgaaactatacaggctattggacagtagtaaaaataaaaccacacataaaaatgtcataaggtagaactaccagaggtaaaacaaagataaaaatagactcttcaggctgggcttggtggctcacacctgtaatcccagcactctgggaggctgaggagagcggatcacttgaagtcaggagttcgagaccagcctggtcaacatggcaaaacgccgtctctactaaaaatacaaaaatcagcttggtgtggtggcatgcacctgtaatcccagctattcaggaggttgaggcgagagaatcgcttgaacccgggaggcggaggttgcagtaggccaagattgtgccactacactccagcctgggcaacagagcaagacaccgtctcaaaaaaaaaaaaagactcttcataagaagcaattaacactaaagtaataaaatatgatctttaggtagtagagaaaaaataattgtaaacttcaaattctatgatcccttaaattctttttcaagagtaagggtagcggctgggtgcagtggctcatgcctataatcccaccactttgggaagccaaagcgggacaatcactggaggtcagaaattcgagaccagcctgagcaaacttggtgagaccccatctctacaaaaaactgaaaaaaattagttgggcatggtggcacacatctgtgatcccagctactcctgaggctgaggctagaggattgcttgagcccatgagttccaagtttacagtaagctatgaccaacccactgcactccagcctaggaaacaaagcaagactctcttaaaaaaaaaaaaaaaagtaaggatgggataaaacaatttttacacattcaaagactaagagagtttacctcccacagatactcaaagagctattaaaaaaatgaacttcaagaccgggcatggtggctcacgcctttaatcccaggacttcgggaggtcgaggccagtggattgcttaaggtcaggagttgagaccagcctgggcaacacagtgaggactatctatactgaaaatacaaaaattagctgggtgtggtagcaggtgggaatctgtaatcccagctacttgggaggctgaggtaagagaattgcttcagcttggaaggtggaggttgcagtgagctgagattgtgccactgcactccagcctaggcaacagggtgagactccatctcaaaaaataaaaaaataaaaaataaggcatggtggtgcatgcccgtagtcccagctactcaggaagctgaagcaggaggactgcttgagcccaggagttcgacactgcagtgtgccaccatcatgccactgcactccagccagggtgagagcgagaccctgcctctgaaacaaacaaaaagcatgaaaaagaaacatggggctggcatggtggctcacacctgtaatcccagtacttcgggcggctgaggcgggcagactgcctgagctcaggagtttgccaccagcctgggcaacacagtgaaaccccgtctctactaaaatacaaaaaaaaaaaaaaaaaaattagccaggcgtggcagtatgtgcctgtaatcccagctactcaggaggctgaggcagaattgcttgaacccgggaggcagaggttgcagtgagcccagattgcaccactgcagtccagcctgagcgacagagtgagactctgtctcaaaaaaaaaaaaaaagaaagaaagaaatagaaacatgaatccaggctgggcacaatggctcacacttgtaatccaggaaaccaatccttgggagaccaaggtgggagaatcacttgacgctaggggttcaagaccagcctgggcaatatagctagaccctgtctctacgaaaaataaaaattaaaaaactagctgcgcggggtggcatgtacctatagttttagctacccaggagtctgaagcaggaggatctcctgaacccaggagtttgatgttgcagtgagccatgagtgtgccactgcactccagcctgggtgacagagtgagacactgcctcaaaaaactaaaacaaaaacaaacaaaaaaatccttgagtctagaggatgagtgatgctctaaagtgtgtcacgcctggcctccaaattcctatattgaagctctgacctccaatataatggtatttggagatggagtctgtgggaggtgattagaattagatgaagtcatggaggttgggccctcatgatggctgggcactctgagaagaagagatctagagagcttgctttttctctccatcatgtgagaacacagggagaaggcagttgtctgagatccaggaagagagaactaaccagaatccaacaatgctgaaactctattctcagacttccaaattccagaactgtgagaaaataaatttgttttaaatgtcacccagctgatgctattttgttagtctatggtatcagtcagcttgagctgactaatacaggtggaattacagaaacaacacatatagcacagaaaataatgaaacagggtcttaatttcaagtaacaaatgtctgtggcacaactttttaaaaatgtttaaaaggtgaaactaaaattctatacaactataaagggtgcgtgtgtatgtttagagactgatattcaccagatagctgtataatgataatgtccttgggtcctgttccagaggctaaaagagagaataaaattacaagccaaaatgaggatgctactatgtatgaaccatttttcttatcactttacatgcataacacagctaatcctaacaagaaccctataatcctggcatgtttattaaccttattttacagagactttggctctggccatgacaaagtattaatagcctatagtagaccaaccctttgcctcttcttataaatccactacagaaaggacgaatatataaaacacatctttgaaggcaatggtgaaaaaccagctggcaggatttcaggggctctgatccatgaaaaatgagaagcacatcaggagatgacacattcatcctatattttttgtctcctgaaggcatatgccaaatcttaagtgtgaaaaaatggacctgaggcagaagcagcaatttcaatgggctgaggagttgaaggtcagagtttggggctgccaaagtagctgagacttaagggacaaaattccagcaaggaagaatccactgagaaagaactctccaaaaaccagaataacctcctcaccccccaccaagttgttaacctatgccacatacatgcaggactagactccccaaaatccaacagcagagaagctaaagagctgagcagaaatctcagcaaacatgtattgttgagagggattttttttttttttttgagatggagttttgctctgccacccaggctgaagtaatggtgcgatcttggctcactgcaacctctgcctcctgggttcaagccattttcctgcctcagcctcctgagtagtggggactacaggcacacgccaccatgcccagctaatttttgtatttttagtaaagaggagactttgttatgttggccagggtggtctcgaattcctgacctcaggtgatgcatttgctttggcctcccaaagtactgggattacaggcatgagccacaactcccagcctgttgagagagattaaaggtcaagcccaaccaaagtagaggaatgctggtaaacactgagctttcatctaagatcctaggagagccaaatcttaagggttaagagcaaaatgaaaacagacttaataaagagcaaaccatgacaggatcaagatgatttgccggtactctaatttgcacacctaaaaaacttaaaccacaatggaggagtatcatttggaacttccagttttttcattcataatgtccagactttgattaaaaaaaaaattaccaggtgcggtagctcatgcctgtaatcctagcactttgggaggctgaagcaggaggatcacttgagcccaggagtttaagaccagcctgggaaacatagtgagatcttgtcgctattagggggaaaaaaaaaaaaaaaggctgggtccagtagtgggaggccgaggcaggcaaatacacacacacacacacacacacacacacacacacacacacacacacagcttaaattgacagaccttaaggaagcaagatgaacccacttatagctggatagacttgaacagtactatcaaagagcttgacctaactgacactttatccagtaactgcagaatacacattcttttcaagtgtatgagaacattcacaaaacagactgtatgccatgccgtaacaaattttgaaggcttgaaatcacacagcatgttctctgacaacagtcaataaaagataattaggtaattctgaaatgtgagaaatgaagcaactttgttttttttttttttgggacagagtcttgctctgtcgcccaggctggagtgcagtggctcgatcttggctcactgcaagctccgcctcccgggtttacgccattctcctgcctcaccctcccgagtaactaagactacaggcgcccaccaccacgcccggctatttttttgtatttttagtagagacagggtttcaccatgttagccaggatggtcttgatctcctgacctcgtgatccacccgcctcgacctcccaaagtgctgggattacaggcatgagccactgtgcccggccaaagcaacttttaaaatccacacattaacgaagaaattacaatgaaaattagttaactattttgactaaataaactgaaagataatgaaaacaaaatatatcaaaatttatgtgaaggaggtaaaatagtttattagacacaatttacagttccaaatgcctttttttttttttttttgacggagttcccctctgttgccagactggagtgcagtggcacaatctcagctcactgcagcctctgcctcctgtgttcaagtgattctcctgcctcagcctcccgagtagctgggactacaggcgtgcgccaccacgcccagctaatttttgtatttttagtagagaaggggtttcaccatgttggccaggatggtctcaatctcttgaccctgtgatctgctggccttggcctcccgaagtgttgggattacaggcgtgagccaccgcgcctggccgcaaatgccttattttaaacaaagaggctgggcgtggtggctcatgcctgtaatcccagcactttgggagtctgaggtgggcggactgcttgagctcaggagttcaagaccagcctgggcaacatggtgaaacgctgtctctaccaacaaacaaacaaattagatgggcatggtggcatgcacctgtggtaccagctacatgggaggccggggagggaggactgcttgagcctaagaggcagaagttgcagtaagctaagatcacaccactgtactccaacctgggagacagtgagagctgtctcaaaaaaaagaaaaaaagaaaaaagactgaaaatcggccaggcgtggtgactcacgcctataatcccagcactttgggaggccaagatagacggatcacttgaggtcaggagtttgagaccagcctggccaacatggtgaaaacctgtctctattaaaaatacaaaaattagccaggcttggtggcgagtgcttgtagccaggaggctgagacagaggaatcacttgaacccaggaggccaagttgcagtgagctgagattgtgccactgtactccaacctggctgacagagtgagacccatctcaaaaaaaaaaaaaaaaaaaaaaaaaaaaagactgaaaatcggctgggcgtggtggctcacgcctgtagtcccaccactttgggaggctgaggcaagcagattgcttgagcacagaagtttaaggccagcgaaaccccatcaaacaagattacttgggctgggcgccgtggctcacatctgtaaccccagcactttcggaggccaaggtgggcggatcgcctgaggtggggagtttgagaccagcctgaccaacatggagaaaccccatccctactaaaaatacaaaattcaccaggcgtggtggcacatgcctgtaatcccagctactcaggaggctgaggcaggagaatcacttgaacctgggaggcggaggttgtggtgagccgagatcatgccaatgcactccagcctgggcaacgagagcaaaactccgtctcaaaaaaaaaaaaaagattactgggagaaattaaatatcaaataaatgtagagacataccatattcacgggtgggaaagttcaattttgcaaagatgtcctttcactctaaattgatgtgtagatttaatacaacctttatcaggttttaagaatagatatatactagatgactttagaatttacaggaaaacagccaagaataaccaaagcattcatggagaaaaacaaaaggaggatttacagtaggagatattgtattactattaagttacactaattaagacaatattgtattgacaaaagaaaaacagaccaatggaacagagtgcagaacagattctttttttttttttctttccccccgaaacagtgtcttgctctgtcgcccaggccggagtgcagtggtgtgatctcggctcactgcaacctccgcctcctgggttcaagcgattctcctgcttcagcctccagagttgctggaattacaggcatgcaccaccacgcccggctaatttttgtattgttagtagagacagggtttcaccatgttggccaggctggtctcgaactcttgaccttgtgattcgcccaccttggcctcccaaagtgctgggattacaggcgtgagccaccacacctggccccagattcagtcttatatgaatgtttatgacaaaagtagcattgcagagcagtggaaaacatgacctttctactatatgatgctgtactcaaaagccatatatggggtgggagtagggggtaacaaccccttcctcatgccttacacaaaaacaattttagataactacacatttaaacagaaaggtaaaataagtttctagaagataacacaaaatctccacaatcttagaggtgcaaaagataccctaaacaggacataaacagtactatccataaaagaaaaaactgaaacactatacattaaaattaagcatgtctactcaccaaagaaattcagaatgaaaaggcaagccaccaggagaaaatataaaaactcttgcatgttaactgaaaagaaaaagaatcccggcggggtgcagtggctcatgcctgtaatccctgcactttggaaggccaaggcaggcagatcacttgagctcaggagtctgagaccagcctggacaacatggcaaaacccatttctacaaaaaaagcaaaaaaatttagccaggcgcagtagcgggcacctagtcccagctactcaggaggctgaggtgggaagatctcttgagctcgagaggtggaggttgcagtaggctgtgatcccgccactgcattccagcctgggcaatgggagtgaaaccctgtccccccaccaaaaaacatctgcccaaaggaaaaatggggcaaacaatttgaattaacaacggctgagtaccccgaggaaacgcaaaaggccaataaataaatgaaaaagtgtccaacattatgagacatcagagaaatgtaaactaaaaccacaaggggccgggcgtggtggctcacgcctgtaatcccagcactttggaaggccgaggcgggtggatcacctgagctcaggagttcgagaccagcctgaccaacatggagaaaccctgtctctactaaaaatacaaaattagctgggcatggtggcccatgcctgtaatcccagctactcaggacgctgaggcaggagaatcgtttgaacccgggaggtggaggttgcggtgagccgagatcaagccattgcactccagcctgggcaacaagagtgaaactccgtcccaataaaataaagtaaaataaaataaaaccacaaggaaattctgggaagacagtagtagtaacagcagaatagtctttgaatctcctcaaattcttacatagtaacagaaaaaattccatggacaacagttacaaaaaaactagacaagaaagaatctccacaaacaccaaattactataaacacaagatttaaatgtgcttcttgctgtgtcacccaggctggagtgcagtggtgcgatctcggcttactgcaacttccatctcccaggtttaagcgattcaatcctttccttcctctctgagaaaatctcaattttctttgccttcctgggagaaaccactgtgcctcagaggcagtaagccccagatcggggcttctcattaaatgtctacaaagagttaatagtcaaataatatcagcattttctcaacttatagaatgtgaagttatagatactatcaaaatatacagatatcaaaaccaggttagcaaagttttacaacagaaatttctagcattgataactgaaaaaagatattcctttttttttttttttttttgagacagagtttcgctcttgtcatccaggctagagtgcaatggcacgatctcggctcactgcaaccctctgcatcccgggttcaagcaattctcctgcctcaccctcccgagtagctgggattacaggcatgcgccaccatgtctggctaatttttgtattttttagtagacacagggtttcaccatgttggccaggctagtctcgaactactgacctctggtgatccacacgcctcagcctcccacagtggtgggattacaggcatgagccaccatgcctggccccaggtattcccacttttaaaactgacatatatcagcgtaagtttgggtctctcatttgaaataatgatattgatgttattaataagtagcatggtatttaaaagaacagctctggtatcaaatttgaactgcatctaatcaagtccttttttttccccaaataagattttttttttttttgagacagagtctcccactgtcacctgggctggagtgcagtggtgcaatctcagctcactgcaacctccacctcctgggttcaagcgattcttctgcctcaacctccagaatagctgggattaagggtgcccgccaccaaacaagctagttttttgtatttttagtagagacaatgtttcaccatgttggccaggctggtttcaaactcctgacctcgtgatttccccgccttggtctcccaaagtgctgagattacaggagtgagccaccacacccagccagatttttaaaaagtattttgaacactattttcaagccaaattttgagacggaatcttgctttgtcacccaggctggagtgcagtggcacgatctcagctcactgcaacctccgtctcccaggttcaagcgattctcctgcctcagcctccctgagtagctgggacgacacatgcgtgccaccatgctggttaatttttgtatttttagtagagaagtggttttgtcatgttggccaggctgatcttgaactcctgacttcagtgatctgcctgcctcagcctcccaaagtcctgggataacaggcgagtcaccgtgcctggccccaagccaaatttcttattttttctttgaccacaactggcttccttcaattttacactgaaaatcaaagggagatgtgagtcatttttacagctaatttagttgaaatgtcaggcttgtagttaagcagactgctagtaacggttcaaaaaattcctcatgagtggcacaccagtggccccaacctgtgagaagaaaagaattctgatgatggaatttctactcttaactaaatgtaagtctctgtatcaggtcatttaactctctgacactcaagtcttttaatctgggcttcggataatactgcctatgtttaaatcttggtttcccatttagtcaatcggtggctccagataaattgttcaatctcctaggccaatttcctcatttgtaaaatgagaatacagttgttttaaaattagttgcgggtaggtagagtggcatgtgcccaagtcccagctttactgtggttgctgaagcaagagaatcctttgagcccaggagttcaatgctgcaagtaagctatgatagcaccattgcactccagcataggcggcagagggagaacctacctccaaaaaaattcattaattttaaaaaataaaaactttttaaaaactaaatcagttgaattacatgaagttttagcacagtgcctgatatatactaagtgtgacattgtgctatttttattaactgttacctgcgaaacagaaaaatcaaaatagctattcttacattacaaggctatgttgaaaaatgagaagccactttgtatatggtaaataccatcaaaatagctgcattgtaatcacaagtacacaggaaatgcagtgcttattaataaaatacagttcaaggggggaaaaaatctttattttcccattccaagttactttttttttttttattgagacgaagttttgctcttgttgcccaggctggagtgcaatggtgcaatctcagttcactgcaacatcccctccagagttcaagtgattctcctgtctcagcctcccaagttacaggcatgttgccaccatgcccagctaattttatatttttagtagagatgaggtttcgccatcttaggttggtcttgaaatgccgacctcaggtgatccacccccccgacactcaccaaagtggtgagattacagtcgtaagtcactgtgcctggcctcttttcttacttatagttgtatttccaatgcctagcacagttgttgaacgagtggctccaaaaacttcttcctctgtcaaagactggagctgttattcaccatggccatagaaccagagtcaggaaacatggcctaggcaacaacaattaggattttcttcagttatcaagtattgcccattacagaaaatatgggaaacaaaggaagtcaggaagaaaagagaatcgctcacggttctctcacccaattttctggttttcaaaatctcaccttcacttcctcgtgaccagaatgcttgaggctgtcttctacaaatcatttttttctccttgttctattcatgctgcttctccatttttccttatgtatatgctcctaaactactactgtatgatcctagggctctgtagtgcccctggctctccagaatacttcctgtaaatatgcctgccacttctgcaacagatttgggggtcactaaagactttcaaatttaatgagttaatccctttgacttcccagcaaaaagtgggcaaagcaggccaggtgcagtggctcacacctgtaatcccaaaactttgagaggccgaggtgagtggattatttgaggtcaggagttcaagaccagcctggccaacacggtaaaacctgtctctactaaaaatacaaaaactagccaggcgtggttgcaggcacctgtagtcccagctactcgggaggctgaggcaggagaaatgcttgaacccgggatgcaaagcttgcagtgagcctagaatgcgccactgcactcctgcctgggtgacagagcgagattccatctcaaaaaaaaaaagaaaaagtgggcaaagcagagctaggcacaggctggaagaagatgacatgcccgtgtcacaccaggcctccacaatacctcttcccagcatgtttttaaaaatgtctataaacgattgtttttcattcaaataccagttgctcatcctaaccattctttggatatccatccttttgtaagtctgtactaatacaattaatattaaatcaatacagaaaaagtttactgttagctctccatatccatatgtgaaagctgtggatatggagagctgactgtactgctacagcattttatgtaacaagaattggttatgcatcatcgggaatacatcaaaacaaactctcaaatggattttgtctcaaagaactcagagtcccatcaatcagagaataaagtcactagtgtaataaagagactatagccgggcacggtggctcaagcctgtaatcccagcactttgggaggccaaggcgggcggatcacgaggtcaggagacggagaccatcctggctaacacggtgaaaccccgtctctacttaaaaaaaaaaaaaagcacaaaaaaattagccaggcgtggtggcgggcgcctgtagtcctagctactcaggaggctgaggcaggagaatggcgagaacccgggaggcggagcttgcagtgagctaagatcgggccactgcactctagcctgggcgacagagcaagactccgtctcaaaaaaaaaaaaaaaaaaaagactataggggaagggcaggtagtcagtgaaggtttcacaggaatagccatatcaagctaaagtgagagacgtgtcagatctgggtttatcctttaaaagcacagcagcccctgactctactaaaaaaatacaaaaattagctgggtgtggtggctcatgcctgtaatccctgttactctggaggctgaggcacaagaatggcttgaacctgggaggaggaggttgcagtgagctgatattgtgccactgcactccagcctgtgcgacagagggagactctgtccaaaaaaaaaaaaaaaaaagagagagagaaaaagagagagagagagaaaaaaagaaagaaagaaagaaaaagaaagtgaaagaaaggaagagaaagagcgagtgagcacaacagctttcacttagggctcctgggcccagagtcatcaggtaaaaagtctgaataccctgctgagagatcacacagaaagacctgacactacacgtggagggaaagagccagtggagcccggccttccagcagtctttgacaaggcatgtgaacgaagaagacattgtggaagcggatgctccagcactggccacctctgctgacaacatgtcgaccagagaaaaatggcccaggtgagcacttctcaattctcctgattcataaaactgtcaacaaacaaaattattctatgaagcagtaagtattagggtggtttgttatacatcaacagataactgaaacagagctcagattttattttctagccaatgggaagcaatgcaatgacagctgtgctttagaaaaatcaacctggctgcaatgtgtaagatggcatgtaggagacaaccggtgccaggaaacaagagccaacagtacctagggggaggagaagaatacaagacactgactgcagagttagagtcgatgggatctgtgtatgtcactggccatcagggcaagaagaaaggaatcaaagttgacctagacgctgagatcaggtgaccacaggatggtgatgctattaaggaagaacaaagcagatgatgagttcagagaaagaaaacgaaaattgtgttaactttaatatgtggacaaaatatggtaaaataacatccatcattatggatataaatatgcaaacaattagtctagagtttaacagctctaagaatcctattatctgtgtatttttacaataggaaaggttttaaatcaaaaattaaactcaaaatcttcagtgggcgggctaaacaatttaacataaaacatcaagattttcttcaactgtccaatgaaaattagtttagaaactaggacagataagtaagtacatcctcatgtgtggagggtaaaatcaacgttttcaacgatctttttagaactgaatcttctgtgaccaaaggacatgcttctgcttctagcccaagtactgccttgcaggctccatcccttgacatgttttcatacggcatttgagttatttcttttaaaccacaaatctcaccatggtgaaaccgaaatccttaccatggcctacaaaacgctaccatcacctgaccttgctgacatagcgggccttacctcataccttttccccccgcattcaccattcagtagtaacaatggttcagttccatgacttgctccttccttccactgcaggctcttccccagctaaactactcttcttcactgcctcttggaccaaattaactctattcattgttcggttctttgctttctcctcagagaaaaattgttcctgattatcccctagatgttcctccctggttcaatcacacaacgtacctcatttcttcaaagtacttccaacaatactttaatatacttatttaggaaactatgtgtaattttggtctcctctgctaaaacttaagttccaagaaggcagaaccaaagtgtcacttgatcccaaagccccaggacatagcatatcggatggcacagtagatgatcttcaatagtagatgtactttcagaataaatagcactcactaattatagaaggataattagtggcatgaactctgggtccaaactgagttcaagttccacgctgacccttacaagttttgggactagatatttttcagcacctcagtttctttttttaaaattattattatttttgagacggagtctcgctctgtcacccaggctggagtgcagtggcacaatctcggatcactgcaacctccgcctcccgagttcatgtgattctcctgcctcagcctccccagtagctgggattacaggcgcacgccatcacacctggctaatttttgtatttttagtagagacggggtttcaccatgttggccaggctggtctcgaactcctgaccttaggtgatctgcccgcctcggcctcccaaagtgctgggattacgggcgtgagccacaccattcccaactatgttctattatctttaacaataatgcaaatataatgatatcaggtatgagaatgaattatgtctctaaagagctagaatatagcaatgcctagaattttgtaaacacattaaatagtagctggtagtagaatcagcaaataccagctctctcaactatcctattcatcaactttcgatctgcctcactcacacctaacccttctttatcagatttctccacaggggcttcaggagttctcttttattagctgctgctgctctaatcagggtaaaaatctaaagcctcgaatgaggtttgccagggggtccaaaatctggcccagactctccaggcatttcctcaaatccaccactactccccacaccccaggcgcaataaattatgaaatacaaaaccaaggcaaagccaggccatgtattagccttcttccttaaagcaagccgactaaattgagatgtttcatagaatcttcccgcttctctcccttctcagcgcgtaaagaatgttctggcagagcacggtggctaaagcctgtaattcttgtgctttgggaggctgagggtcacttaaacccaggagttgggcagcacagctagactccgtctcttaaaaaaaaaaaaaaaaaaaaaagttagccgagcgtggtggtgcgcgcctgtaattccagctactcgggaggctgaggcaggagaattacttgaagctggcaggcggagggtgcagtgggcagagatggcaccactgcactttagcctgggaaatacagccagactccgcctcaaaaaaaaaaaaaaaatgctcaatgaatgggctggggtgggtggggcagagaggagctgacgggacatactacatctaaaacgccactgtttccgagggacgcggatatgctctggtcccccacctacatcccattcagtaaacaaaggtacccaccgaaacatacagcagcacaaacccatttttataagaccctgtgcctgactattgcaggaagatggaggacaaacaacagctggagaatagatgagctgatgtttggctcctaacctctaaaacaatgccaacccagccccttccaggagtaacagcttgaaaacaatacatggcatttagatagtttttagcattcctggcaattccgttactaattcatgggtcttcctcacaagggaagaaaccccatttttgaggcacaggcccaccagggcaaaatgacctggccaggctggagccaggtgcatgtgagggccactgtgaggccctctgctctgctcaccctctacgtcacagtgcttcttctgtaggtgaacgtgtgggttttcagccagggcgcttcttactgaagggcccgagggtcccggagaacatatctgaaacgtcttttgaaaagactgtagcactttgggaggccgaggcggagggatcacctgaggtcagacgttagagaccagcctggccaacacggagaaatcccgtctctactaaaaatacaaaaattagctggacgtggtggcaaatgcctgtaatcccagctgaggcaatccctgtgaggctgaggcaggaaaatcgcttgaatccgggaggcagagcttgcagtgagccgggatcgcgccactgcactccagcctgggcaacagagcaagactccgtctcaaagaaaaggagaaaaaaaaaaaagtaaaagaaaaaagaacgttctctttgcacgatctaagtacctaggacagctgctacccaggcccttagggatttacagagccctgtcggatttgtcagaaatttctgtaacccgcacgccgcgcacgctccagggttggttgcaagtggcccagagtcttggatccctggtcctgttccaccgggagcagaaccacctcgacgcggggacagcggcctcgctcgctgcccagcgcccggacacccgagccgggccagcccccagcgccccgcagaagggtttgacgcacttgcggcgccctcgcgagtgccgggtgacagtcgccaactttcgcggaacacgcgctccagatgtgagggaagaggaggaaaaacgccgcccgcctgggctggggttcacaggcacggcccgcctcccgccgctcctccaggccgcgctcgggtgcacggacaccgcctccgcggcggcctcgggcccgggggagggaagcgcggtctcccgggctgttgccctcgcgcagcagacccgaggggccggcccgcgaaacttcgcgaagtggcgagagggggccacccggccgctcagcgcctttgtcgctccagcctcgccaccgcaccgggctcgagacgcccagcccagccccttggcccgatcccgcccgggcctcggcccgcgcccctcagctcggcggccctcacggcccgcgcccccgcccccacccccggagctccacagaggcgcccctcagagaggccgcgtcgcctcacagacccgcccaggagctcgagcgcgccccgcagccgacactcactcgtcactcaagtcgccggctagccaggcaggttcggcggccttcgctaccgcgccgcttactcctcagaagccgcagctgcgagctccgtggcagccgctgcactccttccggccctgccgcggcgtcacctcgcgcctgcgcacagcgccccctcccgactaaggacaggaagaaccatagaggcactccgggtactgcggaggagggaccggggggctcaccatagagagggccgcctagtcgcgcctgcatccgggctctccgcctgcggagacttgactcccccacgaggcaggagggtgaaaggaaaggagacccccatatccgaccccacaaggagccaccatctccccagagctgaaaagggtatggggcaggtggttgtggatgtttactcgatatctactgatttgccctaattcgtttggcaagtcattcattcattctgcaaatatattctgcggatttcctgtgggccacacactgttctaggaattggggaaattaagagtaaagtgggtcccatggctgggcacagtggctcacgcctgtaatcccagcactttgggaggccaaggcgggtggatcacttgaggtcagacgttggagaccagcctggccaacatggtgaaacccgtctctaccaaaaataaaaaaattagccaggcatggtggcggatgcctgtaatcccagctactcaggaggctgaggcgggaaaatcacttgaacctgggaggcggaggttgtagtgagccaacatggcgcccctgcactccagcctgggcaacagagcaaccctccatctcgaaaaaaaaaaaaagtaaaatgtgttcctggcctcaggaagtttaggttttagtgagcaagtgaataactgactaaaatactgctcctgctgggcacagtggctcatgtccataatccccgcgctttggaaggccaaggcaggaggatcgcttgaggccaggagttcaagaccagccttagcaaaatagcaagaccccaactcttaaaataattgctggccaggcgtggtggttcacgcctgtaatcccagcacattgggaggccgaggcaggcagatcacttgaggtcaggagttcgagaccagcctggccaccatggtgaaaccccgtctctactaaaaatacaaaaattagctgggcatggtggtgcgtgcctgtaatccgagctactcgggaggccgaggcacaagaattgcttgaaccgaggagggggaggttgtagtgcagtgattatgccactgcacttcagcctgggtaacagagtgagactgtgtctcaaaaaaaaaaaaattgccaagtacaccttcaagtagagatatcaagtcagtaattagataaatgagtctgggctgggcatagtggcttatacctggaatccgaacattttgggaaatggaggtgggaggatggcttgaagccaggagtttgagacgatcctgggcaatagagtaagaccccatctttacaaaaataaaaattagccgggcatggtggtgcgcacctatagtcccagctactcaggagactgaggtgggaggatttttttgttttgttttgttttgtttgttttgtttttttggacagaatctcactctgtcagccaggctggagtgcggtggcacgatcttggctcactgcaacctccaccttctgggctcaa

SEQ ID NO: 518 - DNA, 49791 bp, Homo sapiens
  source 1..49791: mol_type = genomic DNA
ttgggaggctgaggcaggagaatggcgtgaacccgggatgcggagcttgcagtgagccgagatcgcgccactgcactccagcctgggcgacagagcgagactccgtctcaaaacaaacaaacaaacaaacaaaaaacacaaatacttagatattttacatgagaattacatttatctatcagatactctaccatgccagatttccttacaattacgaaaaatagcaaacacatattgtttgtaaatgcaacacaaaaacgttaatgctctggtttctatctgccttgtcattccgttatttgactccattttcgaggttagaaactcactgtaaggtggccgggcgaggtggctcacaccagtaatcccagcacttttggaggccaaggagggtggatcacctgaggtcaggagctcgagaccagcctggccaacatgatggaactccatctctactaaaaatacaaagaaaattagccgggcgtggtggcaggcgcctgtaatcccagctattcgggaggctgaggcaggagaatcacgtgaacccaggaggttagagcttgcagtgagccgagatcgcgccactaaaacaaacaaactcactgtaaggaaacaatgtaacccaaggcatttggggtgaccttcacgttgcctgagggtgccgagggaccagagatgctggccatggactaaggtctgggtattctcaggcagcagggacaaggtgggcttttttcctggttgctaaacccacgtcaaagtcgagctcagggactggagctcaagaaacccaccgcccattctccagtccgaccggggacctgcatgcacctctgccgtgctgccctgagtcctccaatcctccacactcttcctctgttatgtacacgtctccacccaggcctgcaaaagtcccagcttcctcgcaggggcagggacccgcacgccggcccagggcttggcacgcggggatgctgaaacagggccaggcctggtttccagccgatcgtcagagtcccaaggcccagcaaccttcctcacaaaggcctcgttaagaggcgaggaaacaagagccgggagaggggcgcggaacggcgggcgggacgaacgaccagctccgcgcctccggccagctgcgtcgagccaggggcaccgcggctgttgtgcggctggaaatctaggaatgggaaggttcggggcctgctcggctccggaggcagctggcgggtcgtccctggcggcgttggagcggtcagtggcagccgggcacgggcgaccgggtcgcccgggtcgccctcagaccgtgactcccgaaaaaccttgcgggcggggcgcgcccgcgccgtctcttgccggaaggtgcgagttagtgcgctcgattgtgggcgggggcggaaagaggcgcgttttaaagtggtaacagatggttttcttatccaataggattaaaaaatttgtccttacccggccgaccgcggaagtagagtaggcgggcggccaatggggacatgatggggggcggagccgaggcctccgaagcggaagtgggttgctgttgaggcggcggcatctttctcgaggagctctcctgggcggctgaagaaggagcttcttctccggagtgcgccggcggtggcgcctgcggacctaactagctccaggttaggccgagctttgcgggaaagcagcggtaagtcagggccttgcagatgcgaggtttaggcagcttcgcggcctacagaggcctcggcccgcgcctcttgggggagccgcgctgcgcggcttgacccagccgaggctttgcagcccgggacctcgagccagctctggtcgctcgcactgccgtccgcgcgggcgcaccgagcccggcttggcgcgggcaacagaagttaggaggtctgcgtctgggtctcggctcaccctggggggccgcggccatggggcttagttcctagcctaggaagggaaactgagactctgggaggggcaggaacgcccccaaggtcacttggaaagtcgggcaggatgtgctgttagggggaagacccgggcagggtttttgttccccgctgacgacgcctcctttgtgtgttcgcgccgccgccccgccatcgtggggcctgcgagtttgccggggtgcgtgggccgcgtggcggggccttttgtaggtcgggaggatctgagtacgggtgcgggcctgaccgtgggggcgccgaggtcgcagtctaaaacttagtagggcctcgatttccgggcgcgcttccgggccccggctggtggttggtggaacgtgcgactgtgaggcttgcggcccagccctgcaccgctcgggcccttcaccgctctggcgcgcctatagacaggtgtatgaagattctcacgacccgaaacagagttgctagtaaacaccgcttttccgcctttgatccatcgagggaagagggaaaaggatagagcttgggcaagccgttttggtagggatttcagcttttgtctttcacttgtcagttcccatagacgttcacaaacttaataatcttcgttctgtttctgcaccaagttcttgagccagacgtagggtctcagctctggagcctggcttagactgtccaactgactggggagactgaggtccagaaaagtgaagtggtctgcccaaggtcacatagccagctatttggcagcagatgaggttaagtcctacctgcaagatttgggttttgaattcattgaccaggagttttgggaccactgtcaataaaagagacattgaagggaatcttttgttactttcttggtgatttgctttttaatggacaaggacatattgggttcagttttatctgtgagtttgaggtgaaatagaggcattcgagtagcaagatatattgctggcttttgtattgcctgaatttgagcttccaaaaatcttactttaacacatcgtttattgatcttttcttgaattactacctttgtaaggaccttttgtaaacattgtttttctaatcttcatgaaatcttaatgccatacgtaaactatttctttttatataatgtatgcacatctgtgctttgtacataaaatgagtaagatttttcactctcctcaagatcaaagtagcgtatttttgaggtctcctgtatgccaacctttctgcttggaatacagcagtaaacagtcgtggtcctcctgtagctgggtgaggatggagggaataagagataactcattttattgtgttttgcaaatactgcctttttttttttgcaaggtgaaggtttatagcaaggattcatcgagcaagtctgtaaatgccagccatttttccaacagcatgtgctcactttgtgtctcttgtgtcacgtttgggtaattcacaatatttcacactttttttttttttttttttttgaggtggaatctcactctgtcacccaggatgcagtgcactggcgtgttctcggtctcactgtaacctctgccatctgggctcaagtgattctcctgcctcagcctccggagtagctgggattacaggcatgtactaccacacccagttaatttttgtatttttagtggagacggggtttcaccatattggccaggctggtctcgaacgcctgacctcaagtgatccgcctgcctcggcctcccaaagtgctgggattacaggcatgagccaccatgcccagccccaaaccttttcattgttacatctgttatagtgacctgtgatcaatgttttgggttaccatgaatagcactcatataagacagtgaacttaattggtaaaagttgggtgtgtactaacagctccactgactggcagttcccagtctctctcctcaggcctctcaattccttgagacacaatattgaaattaggccagtcagtgaccctacagtgtccaggcaaaaggagcagtcagttgaatctctcttactttaagtgaagttaagaaatgtttatccttagtgagaaaggcgtatcaaaagttgagataggccaaaagctaggcctcttgtgctgaatgacagttagccaagttgtgaatgcagaggaagagttcttgaaattaaaatgctactccaatgaatacatgaatgataagccaaacagccttattgctgatagggagaaagttttagtggtctggatagaagatcaaaccatccatgacattcccttaagcgaaagcctaatccggagcaaggtactaactctcttcaattctgtgaagagtgaggaagctgcagaagaaaagtttgaaactggcagaggttagttcatgaggtttaagggaagaagccacctctgtaatgtaaaagtgtaaggtgaggcagtaagtgttgatgaagaagctgcagcaagttatgcagaacatatagctaaaataattgatgaaggtggccacactaaacaacagactttcaatgtaaatgaaacagccttatatggaaaaaaaaatactatctaggactttcatagctagagaaaggtcaatgcctggcttcaaaggacagtctgattctcttgttaggggctagtgtggccagtgacttaagttgtaactagtgctcatttaccattctgaaaatcctagggcccttaagaagtatgcaaaaatctactgtgtgctgatcattgaaacaggaaagcctgtatagtagcatatctgtttacagtatgttttactgaatattttaagcccactattgagatctacagctcagaaaaaaagatttctttcaaaatattactgctcattgagaatgtgcttagtcaccaaagaggtctcatggagatgagtaagattaatgttaacatctgttctgcagcccatggatcaaggagtaatttcaactctcaaatcttacttaagaaatgcatcttgaggctgagcacagtggctcatgcctgtactcgcagcacttcgggaggccaaagctggtggatcgcttgagctcaggagttagagaccagccggggcagcatagtgagaccaccccctccactgccagtctcttaaaaaaaaaaaaaaaaaagggcggcagggggaaagaaagaaatgcattttgtaaggctacagctacatagattgtgattcttctgatgggtatcaacaatgtaaattaaaaacctcctgaaaggatatactattctagataccattaagaatatttgtctccaggcacggtggctcacccgtgtaatcccagcactttgggaggcgaagtgggcggatcacaaggtcaggagatcgagaccatcctggctaacatggtgaaaccccatctctactaaaaatacaaaaaattagccggtcttggcagcgggcacctgtagtcccagctactcgggaggctgaggcaggagaatggtgtgaacccgggaagaggagcttgcagtgagccaagatagcaccactgcactccagcctgggcaacagagcgagactccatctcaaaaaagaaaaaaaaaaagaatatttgtgattcatgggaggaggtcaaaatatcaacatcagcagttcacggtggctcacgcctgtaatcccagcactttgggaggctggggcaggcagatcacctgaggtcaggagtttgagaccagcctgcccaacatggtgaaaccccgtctctaccaacaaaatacaaaaattagccaggcatggtggcacgctcctgtagtcccagctacttgaggagctgaggtaggttaatcgcttgggcccaggaggtggaggctgcagtgagccgagattgtgcctctgcactacagcctgggcaacagtgagattccgtcttaaaaaaaaaaatcaattaacacaacaagaacttggaaaaagttgattctgaccctcatgggtgactttgaggggttctagacttcaatggaaaaagtaactgtagatgtggtggaaatagcaagagaactagaattagaagtagagcctggccgggcctggtggctcacgcctgtaatctcagcactttgggaggcctaggcgggtggattacgaggtcaggagttcacaaccagcctggccagatggtgaaaccccgtctctactaaaaatacaaaaaattagcagggcgtggtggcgcacgcctgtaatcctagctactctggaagctgaggcagagaattgcttaaacctggaggggcagaggttgtggtgagccgagatcacactactgcactccagcctgggcgacagagcgagactctgtctagaaaaaaaaaagtagagcctgaaggctgggcctgatggatcacctgaggtcaggagttggagaccagcctggccaacatgataaaaccttgtctctactaaaaatacaaaaattagctgagcgtggtagtgggattgttactgcatagtaatcccggccactccagaggctgaggcaggagaattgcttgaacccaggaagcagaggttgcagtgagccaagatcgggccactgcactcaagcgtggacaatagagtgagactttgtctcaaaaaaataaaagggccaggcaaggtggctcacacctgtaatcccagcactttgggaggccaaggcaggcggatcacgaggtcaggagattgaaaccatcctggctaacacggtgaaacaccgtctctactaaaaacacacaaaaaaattagccaggtgtggtggcacgcacctgtaatcgcagctactcaggaggctgaggcaggagaatcgcttgaacccaggaggcagaggttgcagcgagccgaaatcacgccattgcactccatccagcctggttgacagaacgagactctgtctcaaaaaaaaaaaaaaaaaaagtagaacctgaagatgtgactgaattgctgcaatttttaaataaaacttgaacacatggagagttgcttcctgtggacaggcaaagaaagtggtttcttgaggtggaatttactgctgaaggtgcagtgaacattgttgagattataacaaaggatttagaatattttataaacttagttaataaaacagtggcagggtttgaaaggattgactccaattttgaaagaagttccactgtgggtaaaatgctgtcacacagcattgcacgctacagagaaatctttcatgaaaggaagagacaactgatgcagcaaacttcattttaagaaattgtcacagttggcccagtgcggtggctcacgcctgtaatcccagcactttaggaggccgaggcaggcggatcacctcaggttgggacttccagaccagcctggccaacatggagaaaccccgtctcgactaaaaatacaaaaaaattagctgggcgtggtggggcatgcctgtaatcccagctactcgggaagctgagacaggagaattgcttgaaccagggaggcagaggttgcggtgagccaagattgcgccgttgtactccagcctgggcaacaagagtgaaactccatctcaaaaaaagaaaaagaaaaactgtcacagctgccccaaccttcattagccactgccctgatccatgagcagccatcatcagggcaagacccttcaccagcaaaaatattacaactttgtgaagactcaaatgatcattagcattttttatttattttttaagagaatatctccctgttgccccagttggagtgcattggtgcgatcgtaactcactgcagcttccaacttctgggttcaagagatcctctcacctcagcctcccaagtagctggggctacaggcgcacgccaccgcacctggctttttgtttgtttgtttgtttgtttttgagatgtagtctcactctgccgcccaggctggtgtgcagtggcgcgatctcggctcattgcaagctccgcctcccaggttcacgccattctcctgcctcagcctcccgggtagctgggactacaggcacgtgccaccatgcccagctaattttttgtatttttagtagagatagggtttcaccgtgtttgccaggatggtctcgatctcctgacctcaagatccacccgcctcagcctcccaaagtgctgggattacaggcgtgagccacctcgcctggcccacacctggctaatttttaacaaagttttgtagactgggtcttgcccttttgtccaggctggtctcagactccagactcatgatttaatatctatggttgagtgattccctacttcttactctcttacagaaccactctataagatagttgttgtagttagccccattttactcttcctgaggcactgggagatcagggtcacttgcccaaggtcacacaattagtaagcagagctcgaaacttcaccccacccctgactcctacctttgttccttttgttaggctttgttatgtcatctgctttttttgtgtggtgggaaagcacatggccaatgtttctagaaacttcaaatagtaaaaacaaaatagtatctttatttttgctttcaccgcagaggagtctgataattatcctcaagaaaatttattgattctcagtaactgtattgtattcctcaaagttatttttcctaagttttctcctctcaccagctaagggaagttgtcctagggcctaggcatttccctgtctgccacacctcacctcttactttagccaaactactgctaaattctgctcctaaatatggcagcattctgtgttacctgcactaaaatttgcttcccttgtaagtaccttcttgatgtcttccagtgttggttctcgcctcctactcttgcaagttgaaaagttgaaaatgcctcaggtagaaatgttctctcctattctcccatcatgatcatctgtgtttttttgttttttgtttgttttttgagacggagtcttgctctgtcacccaggctggagtacagtggcacgatctcagcactgcaacctctgcctcccgggttcaagcaattctcctgcctcagcctcctaaggacctgggattacaggcatgtgccaccacggctggctaattttttgtatctttactagagatggggtttcaccatgttggccagcctgtctcgaactcctgaccttgtgatccacccacctcggcctcccaaagtgctgggattacaggtgtgagccaccacgtccagcccttttctttctttcttttttttttttttttaatttaagagaaggttgtcttcctatgtttcccgggcaggagtgcagtggctatttgcaggtgcaattatatagcacagtacagcctaaaacttttttttttttttaaagacagaatcttgttctttctcaactcacttcaacctccacctcctgggttcaagtgattcacctgtctcagcctcccgagtagctgggattacaggtgggcagcaccacgtctagctcatttttgtatttttattagagacagggtttcactatgttggccagcctggtcttgaactcctgacttcaggtgatctgcccgcctcagcctcccaaagtgctgggattataagcatgagccaccatgccctgcctacagcctcaaactttaagctaaattaatcctcttgcctcagtgtcccaagtaaatgggaatacaggtgctgatatggtttggctgtgtccccacccaaatctcacattgaattcctacatgttgtgggagggacccagtgggaggcaattgaatcttgggggcaggtctttcccatgctgttctcatgatggtgaataagtctcaagagatctgatgctttaggtcgggggcggtggctgatgcctgtaatcccagcactttgggaggccaaggcgggcggatcacgaggttaggagttcaagatgagtgtggccaacatagtgaaaccctgtctctactaaaaatacaaaaattagctggacatggtggtacatgcctgtagttccagctacttgggaggctgaggcaggagaattgcttgaacccaggaggtggagattacagtgagccgagatcatgccactgcactccagcttggacaacagagtagacttaatctaaaaaaacaaaagagatctgatgcttttataagggggagtttccctacacaagctctctttgcctgctgccatctatgtaaggcatgacttacttgcttctccttgccttccgccatgattgtgaagcctccccggccatttggaactggcttttgtaaacttcttgcttttgtaaattgcccagtctcaggtatgtctttattagcatcgtgaaaacatactggtacagtaagttggtaccagtagagtgcgatgctgctgaaaagatacctgaaaatttggaaacagctttgcaactgggtagcaggcagggattggaacagtttggagggctcagaagaagacaggaaaatgtgggaaagtttggaactcgctagagacttgttgaatggctttgaccaaaatgttgataaggatatggacaatgaaatccaggctgagatggtctcagatggagatgaggaacttgttgggaactggagcaagggtcactcctgttatgtttcagcaaagagactagccgcattttgcccctgccctagagatttgtggaactttgaacttgagaaagatgatttagggtatctggcagaataaatttctaagcagcaaagcattcaagagatgacttgggtacagttaaaggcattcagttttataagggaagcagagcataaaagtttggaaaatttgcagcctcctgtcaatgtgctagaaaataaaattccattttctgaggggaaattaaagccagctgcagagatttgcataagtaacagggagccaaacgttaatccccaagacagtggggggaaatgtctccagggcatgtcacaggccttcatggcagcccctcccatcataggcccagatgcccaggaggaaaatatggtttcctgggctgggcccagggttcccctgctgtgtgcagcctaggggcctggtgccctgcgttccagccgtctcagctgtggccaaaaggggccaacatagagtagaactcaggctgtggtttcagaaggtgcaggccccaaaccttggcagcttccacatggtgttgagcctgcgagtgcgcagaagtcaacaatgagggtttgggaacctccactagatttcagaggatgcatggaaacacctggatgcccaggcagaagtttgctgcaggggcgggacactcatggagaacctccgctagggcagtgtggaagggaaatgtggggttggagcccccaagcagagtccctactggagcaccacctggtagagctgtgggaagagggccactgtcctccacaccccagaatgatagatccactgacagcttgccctgtacacctggaaaagctgcagacactcaacaccacccagtgaaaacagccgggagggaggctgtactctgcaaagccacaggggtggagctgcctaaggccatgggaactcacctcttggatcagcgtgacctggatgtgagacatggagtcaaaggagatcattttggagctttgagatttggactgctctgctggatttcggacttgcatggggcctgtagcccctttgttttggccaatttctcccatttggaatggctgtatttacccaatgcctgcacccccgttgtatctaagaagtaactaaattgcttttgatttacaggctcataggtggaagggacttgccttgtctcggatgagactttggacttttgagttaatgctgaaatgagttaagactttgggactgtgggaaggcatgatttattttaaaatgtgaggacataagatttgggaggggccaggggtggaatgatatggtttggctgtgtcccccacccagatctcatcttgaatttccacatgtgggagggacccggtgggaggtaattgaatcatgggggcaggtctttcccatgttctggtgatggtgaataagtctcatgagatctgatagttttataagggggagtttccgtgcacaagctctctttgcctgccgccatccacgtaagacgggacttactcctccttgccttccaccttgattgtgaggcttccccagccatgtggaactgttaagttcattaaacctctttcttttgtaaattggccagtctcaagtatgtctgtctcagcagcgtgaaaacggactaatacaggtgcacacggctgtactgtcccccgtcctgcttttaaggctttctttgtttcctaattgtgactgtttttacttgcaatgtaaaggcttcatttcccccatctctgaaattatttttttctctttcaaaaacactctgccatcttttcaaggtatccgccatctctttcaagcatgtgaggagcttgataacttttgttgggggtcggtgttcagaatgacaagggtcttgcccaggctggagtgcagtagcacagtcataactcactctagcctcaacctcccagggcacaagcgatcctcccatcttagcctcctgagtaactgggactacaggcacgtgccaccacaccctgctaatttttttttttctttggtattaatattttgtagagaaggagtttcaccatgttgcccaggctggtccagaactcctgggctcaagcaatcctgccttggcttcccaaagtgctgggattacaggcatgagccaccatgcctggccctagagcttgataatttcattcattcattcttttttttttttttttttgagacaaagtctcagtctgtcacccaggttggagtgcaatggcgcaatcttggctcactgcaacttctgcctcccgagttcaaggggttctcctgcctcagcctcctgagtggcagggattacagatgcccaccaccatgcctggctaatttttgtatttttagtagaggtggggtttcaccatgttggccaggttggtctcaaactcccaacctcaggtaatctgcccaccttggcctcccagagtgctgggattacaggtgtgagctcagaccttgataatttcagtgaggaaaaaaaaaaaatctcatttacatgtttgtgccaagtgctgtgctagtgggtggggacaccatgataagtatttgataagttatgtttcttgatttaagggagtatagaagaaatggttaagtcaggactaggaggagtgagagaaatggaagcaacctttgaggtaggccctgaagaacgagcagaaattccctaaagcggggtgggagcggcaggaccaacctggccaacttcggaccttctttgaggtccaaagtcaggtactttgaactgacttccaggatacctggagtaaagtacagttctgtttgaagtgtttgtttggaaagatgagtttgttccagtgaggttgctgtattagagaaccacttgagagtttgctgcccacagtgtcatctgtgagaaatattaggtgaacgcaaaaagttgaggccagctgaaccaagccatgtaatatacacaccttccacatagatcagtcacctcagttgacttgtatgtgagccacatttgtgtccatctgatgttacagcattcactctctttgcctccacttctcaataactcacaatctgtaaactgactgaggcccgcttccacagagcaagcttcaggcctttttcaaggtaaagtatcacagttacttgtatttcttaaccatttctcatgtgtagagctttactaccattttcactagattgttttgtgtgtgtgtgtcactgacaacatttttcagtgttgtgccctaattccatttttcctcacaaatggtgggtttttgcatagcaagatgcttttttattttttttaaggaacacatatgtccgtaactgcaaatgaacccagaaaagtgaggacgagttgggaggggaggttggtatgatataaagactttgacctatgttctgtaggcaatgcttgtgattatttgggagcaatacttgcaatattcttggatattttggagcctggtgattcttagcattaccttgtggcgcttttcagttccttggacctcctcctcctgctctcttctgcctttctgtctccttcagagcattcctgttgtgcgtgcctgcttttatcttccctgggagccagtgatttttttgacttgcatgtgtgtttttgtgtttttttaaagacagagtctcgctctatcaccgaggcaggagtgcagtggcatggtcagggctcactgcagcttcaacctcccagtctcaagcgagcctcccacctcagcctcccaagtagctgggactacagtcgtacaccactatgcccggctaagtttttgtatttttttgtagagacaggatttccccatgttgcccaggctgggacactgatttgttagtctactttctaggtaaagtgttgaaggagagttgaagagggcctagattagggcttctgggtgctggatttctccaccaagatgcaagcccctagagagttgagtttggctagccctttggtgacagcttgtattgtcccttagcccacagatgcatctgactaagagtagaagaacatgtctctctttaggagcccggagccagagacagtgctgtttgagattaggccccctctggtgtgcccttcgagaattcccattgtggggcactgctcagttgctcccatctggtatgggtcaaataatcagatttgtgagtgtctcacaaccatccctgtaccccagccaaccctgggttctgaatacagtagaggcagctaagctgctagctggtctccagcaggctctgtgctcagtggccatcaacaccaggtagcttggcaagcctgcctcctgtgctgactgtgggccctggggaagtgtcgaggatgttgacggcctctagcatctgaggtacatctgcccctcggcctccggaggagtggatccttaggtttccttcattatcttaccctttctcctggctcccagaaattaccttgtttttatatgaggccccaaagcctaggccatcttggctgatagatgtgaaagccctttgctcctttcaggcccctggggattttggttgtagcctgattgctggtggcagcttaatcggggccataagataattttatggaagacctggttacttggcatctgaacaagcctcattgcctctctgagcatagtctgctgctttctgctttgatcaaattcattcctcttgtccctgcaaaccttcaggggaggccaatgttcaaggcccctgagccttaggaataaataactctgggtgagaactgcctgtcattggctgtgtgccggctttcttcaacctcctctgagtcctgttctaagtctaagccgttgtgattagctacatcctgccaagtctgttctggaaatgaataaagcccttgctgagagccggaaacattggttccagttcctcctggggtgaaggtttgttttgcctttatttaatagcactcatacctgtaagaagggacatgctctccagcccttctgatataatacctatttattacttgatttgttgatcatctttccagctaggatatatgctccatgggtagttttttgttgctgtttcccatcccattcctagcccctggagcagtgccttacccagactaggcacctgtgaatagttagcaaattagttgatagagctgccttctgggtgctaggaaccatactgggtgtttcattcagcggtcactggttccacagaggtgaggtgttctactcaattaaagatgtggacactgaggcacagaaggcaagtatttgtccaaggctgtagggcttattggccagccacatcattgctgaccgcttaaccacataccctcatttgtataatgagcaagaggctcatatttcttctgagtattaaggtgtggttattgatatgactgagggtatcaaagttctgtttaagaggtgtttgtgaacaggtgcggtggctcacacctataatcccagcactttgggaagtcaaggtgggcagatcacttgaggtcaggagttggagaccagcctggccaacatggcaaagccccatctctactaaaaatacaaaaattagccgggcatggtggtgggttcctgtaatcccagctagttgggaggctgaggcacaagaattgcttgaacctgggaggtggaggctgcagtcagccaagatcacaccactgcactccagcctgggtgacagaacaagactgtgtctcaaaaaaaaattatttgtttttattgatttttatttatttatttattttgagactgagtttcacttgttgcgcaggctggagtgcaatggtgcgatctcggctcacctccacctcttgggttcgagcgattctcctgcctcaggttcccgagtagctgggattacaggcgcccaccaccacacccagctaattgttgtatttttagtagggggtgggtttcaccatattgttcaggctggtctcgaactcctggcctcaggtgatccccccccgcctcggcctcccaaagtgctgggattacaggtgtgagccaccatgcctgacccaggtctcttattttcagtgggtaattgtatcagactctgcctcccaggtggggtttgagggttctgtgtacctggtgtaggcctaggctaaacagaagagcttctcgttagagcatctccctgtggactggctgcagagttacgatatcattctggttctgctgtgctccccactgccccttttcagctgactctttgctcataggaatacagtggtatgagatagggtcatagaatttggttccagtctaacactcttcctgtttcctgcccgcctgtatgtctctatccattagcagactcctttatgtatgatagagacacatgcacatatgcatacacggacagtccctgacttacagtgtttcatttagaatttttcaacttatgatttattgggagttagccccattgtacgtcaaggagcatctgcacatcgtatacatatataccatgaatacacataattatatgtcacactcctgctagagtggggggggtcaatatctgaagtgcttataatagctttattgggggggacctctaagaaaaacagaataattacttagaccttaaataataaatctataagaatgaagaaagccccaaagcccttccagcttccatcccgtcagtcacctctctgtcctatactctgccactaccccgagcctcatggctttcttctcacctgggctaccctgagtctcctccttggtctacagtctgacttgttcagtctcccatctgttctcaccagacacaggtgacatggtctctaaatgcagatctcaacatgtcatctctgtcccaaaaccctcgatggccctgtcctgagggtgtagtcagtgaggcttgttaggaaccctcggcacctttgttgtcctccacacagtgctcgtgtgggacatccctgctcccttccgcccaccccacccacatacattgtttcttaattaactcctcctgtcacttgaggccccattcagcactgcttcctctagacagcccggcttgatcctcagcgcgtttgggctgggactgcgactcctttgctgctgcttccacttgcttaggtcaccagcgtcccacttccgtgtttgagctcactggccgcctttcagttccccagcctgtgcattgcagctgttcactgcttcctcctccttgaagaaggaggttttgtctgagtgacggctccaggttctcctagctttgtttcttttaaattctcttttacagattctatctacctgcctccccaagttttcacacattctgaaatctctacgtccatccgagttctcactcttgagtttccagctaccttgggccctttctccctgggtgtctcacaccctgcttttctaaaactacactcagcacctgtttctgttctcccttccctcattgggttttatggcctcattcttgcagagtaagaagctagataccttggcgtgagttgtttctcctttcaccttggaagctttaggaatacctagcatccggctctcctgaccatccccagttaggaatgaccacttctctaccccagctcctcttttctcagtggcaggggcgccatcaacaccccactcttaccctcatttattccttcaataaatatgagcatctgctttgtgtaaggtcttagctaggtagaaagtaaatagagccttgtcctcgtagcgcttacctaagtgagagcatactggacgagagactggaggatggtggggccctttcttgaaatggagtatatgttggcggaaggaggaggcaagggttccttttggaacacactaaatttgagaaatctgaaaaatcaccgtcagtgttcccgctagtttctggaattgatgtatttgattctggcactaacatacctatttgagggtgtgggtcttggtatcagactgccctggtttaagtctaggctctgtttactaggtgtggatgactttggggaagttccttaactttaatccttagctgcttcatgggtaaaatggggaacataacagtgcttatttccttactgggtgatgtgaggagcacatgtggtgatattaatatttaggaagcgcagtgccttgtgcagatgcagagaaggcacctctcagctgttgttagttttcttattccattggactctcacctgcatgatccagaaccctttgtagttggtgagggctactttcccatgaccgctaaggtctccattcactctgcatttctacgtccccaccacgctgggatgctctgctggaaatgctcctgtctcacctcagtgccctggtgaaatccagcctcttggtggcttatccccaagaccagccttccaaattcctttgaactctgactcctgacccttactaaacccaaaagagagagaaaaaccagatttggggtgaattgctgtatgggccagggcatggagaatgagggggctccagaaagcttcccagggaagtagtaatggtctagctgggcctgcagggatgcaggaggctggtttcagagtggtgaggggtgtgcaggccaggacagccacaaggcacatcttcagcagccgtatttggaagcctcaatatcagtgaagtgggaggagagaggcttaggaacagcctgggtgtggacatcaggtgtttccctttgctctgcaggctgatttctctgtcttcctttgtcagtagcttctcttttctaaattctaagacacgctattgatgtggcggggagaacaagcccctatatgatagatgtgcacccaaatgtaagatatttcttgagatcagaaacattcgtggatatgagaacccaggacatgtggtggatctgggactgtcgtgtggtctgaatgatcttgtgagtcctaaggtgatgtcgaggcacctcccacctctgttgaaaccaactagacaagtcttttcctagccagagcctcttccctgaatgtctgtttaaagttgaacacttaccaggtgaggtgttgctttgagaagcatttgtgctccgggctggagtgcaatggtgcagtcatggctcactgcagtcttgacctcctgggctcaggtgatcctcctgtctcagcccctggagtagctgggactacaagtgtgcaccgtcacatctggctatttttttaatgtgtttttatttttattttttgagacagagtctctctctgttggccaggctggagtgcagtggtgccatcttggctcattgcaacctccgcctcccgggttcaagtgattcttgtgccttagcctcctacgtagctgggattataggcgcacaccaccacacccggctaatttttatatttttagtagagacggggtttcgccatgttggccaagctggtcttgaactcctgatctcaagtgatctgcctgcctcagcctcccagagtgctgggattacaggcatgagccactgcccagcctcattattttaatttttttatagagacaggatctcaccatgttaaccaagctagtttccaattcctgggctcaagagatcctccctcttcaacttcccaaagtgctggggttatagggcatgagccactgtgcctgccccatttgtgcattctgttgagagcacccgtagtcccatagtatgggccagcctaaggagatgcaagtcaccctttattagagtgaaacagtgaaggggatttcccctctaaaccattgaggtcaagctagagaatgaggcgctcagggagtgagatacagtatgccattttctcagaaccagacgaccaagtgctgaagaaaatgctcagctcagctgggacggcggtccctttgggcatctcctgaaaaacctactctggcctccctttctcctcctgtacttcttgcacacttagttcctaacttcgttatagctgcctgccagcaccctcctcacccttctccccgccctagattctgcacagaggctgtgtttgctcattgctgtattcccagggcaggggctgtactgtgaatgaggcggggaggtatgcatcctttcttaaagctgggtgggaggacagacgtggtggctcatgcctgtaatcccagcactttgggaagccgaggcaagtggatcacctgaggtcagaagttcgagaccagcctggccaacctggtggaaaccccatctctactaaaagtagaaaaattagcctggtgtggtggcacatgcctgtagtcccagctactgggaggctgaggcaggagaatcacttgaacctgggaggtggaggttgcagtgagcccactgcactccagtctgggcaacagagtgagactccgtctcaaaaacaacaacaacaacaacaaaaaaaaactgagtgggatgtgatatcacacagcattttagggcttgagcagaaggttggagctggtcactgggaaggtttatttggagagactgccaacctggtgctgtggggctgagtgtggtgatgggtatgtgtcagcccacagacactgagcctttccagtgtgcctgcactgttccaaacactctcttgtaataacttctggaatcctcacacaccattaaggtaggtgcagttctgttctatagataaggaaatggggcacagagaagttcaatgccatgccccaaggtcacaggttggggtttgcaggtgcctggattttattttcattttttatttatttatttatttttttgagatggagttttgctctcgttgtccagggtggagtgtaatggcatgatctcggctcctctgcctcccaggttcaagagattctcctgcctcagcctcccaagtagctggaattacaggcatccaccaccactccaggctaattttttgtattttctagtagagacggggtttcaccatattggccaggctagtctcaaactcctgacctcaggtgatccacccgccttggcctcccagagtgctgggattacaggtgtgagctactacacccggccgatgcctggatttcaatctcagttgcctggctcaagagatgtgccctaattgcagtgccagcctggctccacacaccatgcttaggagttaggccttgataaggagccagggaaagttgctgcggcaaatgtttcggaaagatggcctggcagtagggtagacgggcacccagggacaggagacccagcatgagcaggcatggtaatggtgcacaggaggatgacacggcacagcactggggatgcacagaagggtggatgtgagagcgttcctgtcgtttccgccacctggatccctctcacctgtgtctgttttgcaactccatctcgttatgctacttcagtacgttccatggtgtggtctctggaagcagcacctgggaacttgttagatacgtaaattggagggcctagcaggctgtgcttaacgagccctctgtgggggagcctgatacaggctcatgcttgagaagcactctcctaatctaagccactagcacccagcagtgggtggccacaagggtcttgtccttgctttggctctctctcaaccctcaggcttgcctgtgctcagggctttgtggctccattaaccatgcgtcgctgacgctgagtttaccgtggtcggcctcgcttctcagtgaagtccaagggcctcgcagcctctgcatctggtgatttctctgcctttcctcaaagcttctgcttggctgcctagtccacagcctcccgattcaccattcacctggtcccagcaacagaagtctcagctggacacacaacatgctttagagtgagtggctcttgtcttctcaactccggacggcgacagtgaaattgtgggaagaacctgaggctctgagctgtggcctcagaagctctgtcccttcccttctggttcctgaggagttggtgtggtcatgtgtggcagtcctgactcgcacctcctcccagcagttagcacggtaccttgccaaggtggcaggagccaggaagaagagtaggaggtggcataataattacaattgcaggctttgggatcaggaagtcctacatgcgacaagaatgcttacttcctaagatgaatataggattaaggatgtcattgcgtgaaatagtaagcaaataacctagggacaggaaggaccagtacattattgagctcagctttgtttcaatgatgtaagtggcagtatttatcaaattaatatctttgtttttcaggacttgaaaatactggaaatctgtccggatccaaattattttgcaagccagatgagtaaccagagggcatgaaaggttgagaacatttgacttccctgcaaaccttggtatagatcacttccttttctgtaggaaaggaaaggcaccaaagagcacaatgagtacagtaagttttatcatctcttgaatttttaattttgtagggctaattaactaccttattccttgtagcacattagtgaaagtgagttccataatgtcacttctaagtaaccccacttcttgaaggagtatgtataggagctttctggtggttacatcagcttacttaccgacattgagctacattcgagtcataaagggcagagccctgaagacaaaaggctgagaaggaatagcttagggtttggtaatctcagaccttcacaacagttgtcagtgtcatagaaatactaaaactttttgctttttaaaattgtttgtagactgggcatggtggctcatgtgtaatctcaacacttggaggcgtgaaggtaaaaagattacttgagcctaggaccagccagggcaacataggccccatctctacaaacaaacaaaatgtagccaggcgtggtggggcgcacctgtagtcccagctacttgggaggctgaggcaggaagattccttgagcccaagagttcaaggctagctatgatcacaccactgcatttcggcaggatgactgagtgagactctataaagtatttgcaacccagttttctgttttcccgtctgttttgtttccctgtgacattcttggttcattcagtgtgagcatggtagtaataatccatagtgaaaagtttcttatattcactgaccaaagttgattcgtcattataattactgtttagcgcttttgtttgtttgtttttgaaacagggtctcgctctgtcacccagcctggagtgcagtggcccgacctcggctcactgcaacctccacgttctgggttcaagtgattcttgtgcctcagcctcccacatagctgcgattacaggcatgcacctccccgcccagctaattttgtatttttaatagagaccagtttttgccatgttggccaggctattttggtttgttttttgagatggagtctgttgcccaggttggagtacagtggtaccatctcggcttgctgcaacctccgcctcccaggttcaagcgactctcctgcctcagcctccggagtagcttggattacaggcacctaccaccacacccagctgattttgtatttttagtagagatgtgatttcaccatgttggccaggctggtctcaaactcctgacctcaagtgatcttggcctcccaaagtgctaggatgacaggcatgagccaccgcacccagccgtttttatttgtttttaagagacagggtctcactcagtctcccagtctggagtgcagtggtgtgatcatagctcactgcagtctccaactcctggagtcaagcaatcctttcacctcagcatcctgagtagttgggatcataggcatgcaccaccgcacctggccaatttttaagaaaaaattggccaggtgcggtggcttatgcctgtaatcccagcactttgggaggccgaggtgggcggatcacgaggtcaggagatcaagaccatcctggctaacacggtgaaaccccgtctctactaaaaatacaaaaaattagccaggcatagttggcgggcgcctgtagtcccagctactcaggaggctgaggcaggagaatggcatgaacctgggaggcggagcttgcagtgagctgagatcgtgccactgcagtccagcctgggggcagagcaagactccatctcaaaaaaaaaaaaaagaaaaatcatttttgtaggcatggagtcttactttattacccaggctgatcttgaactcctggcttcaagcagtcctcccacctaggctcccagagtgagcgacaatacccagactgtttagagcttttatcacatctgtgagacagctctggtttggtgtaattcaggtgtctcctggaaccccttgagctctcgaggagattacctgaaggtccccctgtcccagtttattctctactgacagagttctcactgcaagtttgttcaaatgatctaaactcaaaacatctgttgtctgagatcctgaattccttgtcagacagaccagatgtgaaatagcctgctgatttcttccagtgctccagaagtactgtgaatggtatgggaagatggatggtggggacaggtgagactgaacaaacagctgtcagagggaacagtgatggaaatgctggtcacaccctctgagccttttgggtcctcaccctcttctgttacttcctggccgccattgtgctccagggcccacttttgatggtgatacacaaaaaagcccacttctttgacctcccaccttggtgcttcacctgcaggttaccatgtagctcacctatggggaaataggtgctttaagccttaacccatctctgcttaggccagatcagaacaggcaaaacaatgtagccttttgtgcatgtgtgtgaagaaattggttaaaattcctgaaagttacggtgtggttatagcttatgtggttgtgataggatggtcagttttcaccaaaagctatggacctctgagggccctgctagtgaaaaggaagagaattatgaccagaattatgggagggccagagtggggagctctgcagatattcctggattgattgagcctgtcttgagtggtgcagggaagctacttgggaggaggaggctcagagacagcagagtgggagggtaaaggatgtcctcaggaaggaggtgacatttgagtgggttctggaaagctgtgcaagaattggccaagtaaagaaagggagggacaggcactccaggcagggaagaagctctggttaaaggcatggaggggtcgatagagcaggcagaaaagaggattcctgaggttagggaggggtggggacattcctgtaattatccgtgaggggagattttgggtccaggacccatggctgctttcttggctccctcagtggggcccagaaaccacacaggtagctgtgggacatggaggtctgcttagcagtgcctagtaagaaagacttggtctgctacaggctgggcatggtggatcacaaggtcaggagttcgagaccagcctggccaacatggtgaaaccccgtttccactaaaaatacaaaaaaattagctaagcacagtggcgggtgcctgtaatcccagctactcgggaggctgaggcaggagaatcgcttgaacctgggaggcagaagttgtggtgagccgagatcattccactgcactcctgcctgagcaacagagtgagactccgtcttaaaaaaaaaaaaaaaaaaaaaagacttggctacaagggaaggagcctatacgaggacaaaggacattgtcaaagagaatggggtaaatattttcatttatttattattattattttgagacagagtcttgctctgtcgcccaggctggagtgcagtggatgcaatattggctcactgcaacctctgctgcccgggttcaagcgattctcctgcctcagcctcccgagtagctgggactacaggtgcatgccaccacgcccagctactttttgtgttattagtagagacggggtttcagcatcttggccaggctggtcttgaactcctgacctcgtgatccacgagaatggggtaaatattaaagagtcctaagtgtttgaaatgcttgttttctggtgctgtaaagaaatagcatttgaacgtaaattcaattttttttagcaaggccatatttatactttctgcagaaagggtacactcaccagttgttttgccatgagaatacattgaataaaggagacagggttatttataacttgatgtgtttactctgctgctgtatccagtttttattggctggaacaggacctcacattctgtatttgtcccaattggctagcaacttagaacttttttttttttttttttttggagacagagtctcactctgtcgcccaggctggagtgcagtggcatgatctcggggtcactgcaagctccacctcccgggttcacaccattctcctgccgcagcctcccaagtagctgggactacaggtgcccgccaccacgcctggctaattttttttgtattttttagtagagatggggtttctacgtgttagccaggatggtctcgatcttctgaccttgtgatccgcccgcctcagcctcccaaagtgctgggattacaggcatgcgccaccacacctggccagaacttttgaaaagaggcaaaggcagaggagaataaaggaaggaggaagtaacttgtggaatgctgaaaaaggtaaaaataacctttaaataaggaagaggaacaggctatgatctaatgcttgcttggactaatataagcatgccaaggtaaatatttaggctaaattgtgggagctaagaatataaagtacattgatttctttattatggctagcagatatttaagaatgttagtacaggtctttgaataaattttgcttttaagagaagttactatttatttctaattagatggggaggaaagtctttgaagaggaacctctactttactttttacataagcaacctggtggctgctggggaaacccttaaaacactgggcagtagaactccactgaggttagtgtcagctcccttgaggccaagagcagctgctcacttgggagttttggctgctgtcgcttggcctctgggccctcctggggctggttctgtgctccttagtccgtgggaagttactagacccagcttcatttccaaaacatctcaagctgccatttgataagagtagcattggaacacagaatcaggcttatccctgttgcctagcgagggcttggctggatggtgggtgttcctggatcttgtatgaatctctcctgcaatatctggtcctttcagagtttcctgggacagattgaccctagtaaggctaaggaattgggatagtagtagcatcttccgtctctgcgcagtactttacatacatgatctcatttagaccttataacagctctgcaaggctggtactggtgaggaacttgagacttagtagtgcagtacttgtcccaggttgtccagtgcaaaggatagcaggacagggcacagggagaagagcacggaaacaccagtgggaatacaaggtgacaggctctgttgggaagctcttttttttttgggggggggtgagatggagatttactcttgttgcccaggctggagtgcaatggcacaatctcggctcaccgcatcctccacctcccaggttcaagtgattctcctgcctcagcctcccgagtagctgggattacaggcatgtgccaccacgcccagctaattttgtatttttagtagagacgggtttcaccgtgttgcccaggctgatcttgaactcctgacctctggtgatccgcctgcctctgcctcccaaagtgctgggattacaggcctgagccactgcgcctggccagctctgtctcttgattaaggtggaggatattctcagcttgtcttttgggaccaggcagaccagaaatgctggagcatattggcaaaccagcagcctaaggatttggaagaaaggctggtcagagtgtcagttgcttatcaaccagctgagagcctgaactttccggaagacatggctcttgggtagccactgggaacaggcttaaaacagctttggttctttgagttctttgtggggagtgattgtctggtgtgaatcacagttgatagtgccctgaaaggttcaaggccacatttcccaggggaagataagctttccacaatgtatagaaactcagaaaactccaagttctttatgctaagaaacaaaaagggctcagaaaggctgaacacaaagtcaaggaagagaaattgataacttttggttaaagggaagagtttccagccttttggccagggcatccactaccaagtccaaatcctgacttggcctcaagcttttgtaaagggatgcatcgtgtcccttttgacctgctgatagtttttttgagatggagtctcacactgtcacccgggctagagtacagtgacgcgatctcgcctcactgcaacctctgcctcccaggttcaagtgattctcctgcctcagcctctggagtagctgggattacaggtgcctgccaccacgcccagctaacttttgtattttcagtagtgatgaggcttcaccatgttggccaggctgaccttgaactcctcacctcatgattcgcccacctcagcctccgaaagtgctgggattacaggtgtgagccaccatgcccagccgacctgctgatagtttgataaaacagaagttttactttctggaatttctactcattttatgttttggatggtttctctctccgtaagcattcagtattcttgaatctcaagttttgaaaggagccctaacttcaagtctactcgctggcttcttaatgaagtgaaccatttctattgcccatttagttcttcctgaaaccctgacattctggtgttcatgtgactcttctttcccccttgctactcagagaaagcgtcgtggtggagcaataaattctagacaagctcagaagcgaactcgggaagcaacctccacccccgagatctccttggaagcagaacccatagaactcgtggaaactggtaagattgccagggacactacaactgtggggtgttaaagtggagagagaacactgtaccagggtgagctagtagaaggtgctttcagtgtctttagaaggcctatgcagtctcacactcaccatgtacaactcaaagcttcacagattctgaaatagcttctcaactgggctaactgttcaactctggtaatgtgcagcagtggggtaggatccatttaaaaaaaaatctagcgcaaatgagatagcccaccttttctatctgaaactgcatccccaattgctggaccttgtaaagtacttcgctttcctcttctgtttttcattaggacatgaaatcacccaagaaggcaaacttgtccacagagctccctgtgttggagcttggtataggcagaggccagattggatttccccttctgcctgctcaagaagtggttgatggctggcctaagtccctttgctctgcatatattgtttttataactaggatacctgcaaactggcattttatttttacttatttatttttgagatagagtcttgctctgtcgcccaagctagagtgtagtggtgcagtctcggctcactgcaagctccacatcctgggttcacgccattctcctgcctcagcctcccaagtagctgggactataggcacccgccaccacacccggctaattttttgtatttttaatagagacagggtttcaccatgttagccaggatggtctcgatctcctgaccttgtgatccacccgtctcggcctcccaaagtgctggtattacaggcgtgagccactgcacccggccatgcaaactcgcgttttaaacagaagaaacttagtgcaagataaatttcatgggccccccaggagaaatgaagttctctatatggtctctgagtttcacttctacaaatgagttcttgaaagccttgacttgaggctaggatcctggctctagaccaaaaaggaacgaactgctttccgtcatggcacttgtcatcctctaggcagtcttacccctgtgtgtacttagggctgcccattagagcactgttttgtttttgtttctgtttgaggcagagtttcgttctgtcagccaggttggagtgcaatcgcgtgatctcggctcactgcaacctctgcctcccaggtttaagcaagtctcctgcctcagcttcccaagtagctgggatcataggcgcccaccaccacacccggctaaattttttttgtatttttagtagagacggggtttcaccatgtcagtcaggctgatctcgaactcctgacctcagattatccacctgccttggcctcccaaagtgctgggattacaggcctgagccacccgcctggcctagagcactgtttttgtaagagcccagaattgtgttcaccagaaagagaatggttcaataaattgttgtatatcagtatatggactgttggacagcccttctttttaataaagaatgcaataattttatataaattatattgtatatgtaagattatcacggtttttattcttgtgaaactttatgatacaagaaaataaaacaggccagccagattgcttgagcccaggagtaccagaccagcctggacaacatagtgagaccctgtctctataaataaaaaaattagccaagtgtgggaggctgaggtaggaggatcacttgagcctggaacattgaggctgcagtgagccgtgatcgtgccactgcactctagcctgggcaacagcaagaccccacctaaaaaataaataaaagaagttacgttgggttgggcgccatggctggctcctataatcccagcactttgggaggccgaggcgtgcagatcacctgaggtcaggagttcaagaccagcctggccaacatggcgaaaccccatctctactaaaaatgcaaaaattagacgggcgtggtggcgggcgcctgtaatcccagctacttgggaggttgatgcaggagaatcacttgcacctgggaggcagaggttgcagtgagccgagatcgtgccactgcactcctgcctggacgacagagcgagactctgtctcaaaaaaaaaaagttaaatgcattacaagacactttccccaaatattagaccaatactgtttcttaaaaaacttcatttagtgttttgttgttgttgttgtttgtttgtttttgagatggagttttgctcttgttgcccaggctggggtgcagtggcgtgatctttgcatcccggggttcaagcaattctcctgcctcagcctcccgagtagctgggattacaggcatgtgccaccacacctcgctaattttgtatttttagtagaaacggagtttctccatgttggtcaggctggtctcgaactctcaacctcaggtgatccgcccacctcagcctcccaaagtgctgggattacaggtgtgaaccactgtgcctggcccattccgtgctttttaatattaatattaatagtaatcagaaataaaaatggttgtgcgtcattttttactttatataaatggaagttgtacgttaactgtttggtccatgtccttctcacctttatcctgtgcacatgtagacatcacagtataccctaagggctgaaaggcaagcttcacaacagatgcaacccattttgtatgttgaggttctagctatcagtatatatcactgttattctccatccaactagggagacaaacttgagagataaatggaaattaaaagtttgtccttggccgggcacggtggctcacgcctgtaatcccaacactttggaagactgaagtgggtggatcacaaggtcaggagttcaagaccagcctggccaagatggtgaaaccccatctctactaaaaatacaaacaaaattagccaggcatgctgccaggcgcctgtaatcccaactactcgggaggctgagacagagaattgcttgaacccaggaggcggaggttgcagtgagccaagatcgcaccactgcactccagccttggcgacagagcgagactctgtctcaaaaaaaaaaaaaaaaaaaaagaatttgccctagattaaccgatgaagttactaagctaagcctgacttttggtccttgggccaagtgagagtggtcagcttcacctgctgggaggagcagaggtttcaggctagtccatcccaaagagaaaggcctggggctgggcatgcatggtgcgttctcccagatggggcacagaggcatagccgtgtggaagtgggatgccgtggaatagaggtatgcacatgcgcacacatacataaccccccaggtacatttgtaaaaaccatacctccccactcagagcagaattctggaagggtggttactggctttccctcctgagggaggtgttggtcctggtgctctttgcagtgtatacttcaggattgttttagtttggggtaagcctataacattagcagtcatactaaagtgtagagggatacaaccttactttcctcttaatcttaatgcttgttgaaatactttcttttgaagctggagatgaaattgtggacctcacttgtgaatctttagagcctgtggtggttgatctgactcacaatgactctgttgtggtaagtgttggagtgtgagagtcggctgtttcttgggtatgggtccctggccagtgccagcatctgacagccttggtcacagactccaagtcaaggttacagcttatgctaaagaagttcatgcatcttgtggaattgagcttttagaaagaaaataaacagtaacaataataataacaaagaagttcatgcattcagtgacgagagcccaaaatgaaaaatgtttctggaaaatcatttgttatagccttgtcgcctatggagtaggtctgtgtaacctgaccttgccacacctgggcacaaaagtggtttggggagaatctcaagacccccacatctgtcttcagtccctgattccacagtttacaccagctgtgtgaccttgggcatgtgacttagcctcattcactttccatgaaatggggacaggtcactcatgtcagcagggcatggtgtaagacatcttacaacagatgccgtgtttgagtgcctgacacctagaatggtgcccagtcactgtgagtgtatgccctcccaactgaaaggaaagggaacgttggctcagcactgcccatgggaaatctctcaagttccaaaagtgcctgctacttagcatggcctcaggggatgcaggctccctgcattgccacctgatgcctgctgcgtcctgatgccagggaggctggagcccaggaggctgcctgtgtccctgtctcatggcaccggttacagactgcaggggacgtgtgtatacgtgtcctgcctgccaggagggaggccttgtctggtcagaggacacacggagaagctatttctgatagacctgtttcatggtgcatgcaggtctgggaatctggtcagcatcttaagggcaagtttgcctctggaagatgccacttgagtgttttctgacagtgtgctcggaacacaggtcggggtgggggcacacttggcagcattggcagtggggtggtaagtgctgctgaggaggactgtggggtgtgggggctgctagtagctgagtcttcgccttggccctgggctcactggtgttggggttatcctgtttggctgatgcctgggtatctgaatagggacaccccataggtgttgcttcttagttgtgctgagaacttcagaatagggttatactgagaagtttcaagacttcaatgcaaagaaaaggacagggatggaaaaccatctgagataagcagcagtgggtttagttgtacgtggtccctgcttaggtctcattaacgtgttttctgaggtacatacacacatatgactttgcttatcatccctgtgtcctgcatggagttctggaaagataactaatttggtatattagctggcagctacagcacagtcactgatttttcccctctttctttttcccagctgacaccttggtttcaccagttgctcattaaagctggaaagtggtgtctgcagaagtttttttgttttttgttttttgtttttcttgaatactcagtgttcaccacagtcttcttggccttctctctgccagaccctgaggagagagctaggattttgactgcaggaagacaatgattgattggcttttgttggctgacaaaccaacatcatttcccctttcacacttgtgttttcttttgctttagaaacagggtctcaggctgggcgcggtggctcacgcctgtaatctcagcactttgggaggccgaggtgggcggaccacaaggtcaggagtttgacatcagcctggccaacatggtgaaaccctgtctctactaaaaatacaaaaattatgcggacgcctgtagtcccagctattcaggaggctaaggcaggagaatcgcttgaacccaggaatcagaggttgcagtgagccgagatcacgtcactgcactccagcccgggcaacagagtgagactccatctcaaaaaaaaaaaaaaatacaaaaattagccaggtgtgatgatgcatacctgtaatcccagctactcgggaggctaaggcaggagaattacttgaacccaggaggcggaggttgcagtgagccaagatcgcgccactgcactcaagcctgggcgacagagcaagactctgtctcaaaaaaaaaaaaaaagaaaagaaaagaaacagggtctcactctgttgcccaggctagagagcagtggcatgatcacaccttactgcagcctccaacccctgagcttaagtgattctcccacattatcctcctgagtagctgagactacaggtgcatgccaccatacactactaaatttgggtcgggtggtggtggtgattttttaatatttttgtagagacagggtctcactgtgatgcccaggctggtcttgaactcctgggctcaagcagtcacccacctcagcctcccaaagcactaggattacaggtgtgagccaccacactggccagctttgttttgttttgatgactaagctgctcttgctaaaagggcttcctctctgaacttccctacctttcttctgtttccctgggctagggctccatgttggcagtcctactcccaattaacctggggctgtctggttaacctttataagatctgcagtcattgggagacccggggaccaggaatattggtgttgagggagctaccctggaaagtggatgggtggccagagggagagctgataggtaaaagggagacgctcctggcttgggaagcaggagtcctaggttctggtctctcagatctactggtcagtttgatcagtggatttatctcacactgtcctcagtgttgtcagccacaaaataactgctttggacttgatagctcttgctaatcattctctacttatttttgattttaataagtccaagtgccagtttatgaatttacactgagacatatacttgagtttggaattctgcctctgagcagatctgtttgggaggcctctaatgctagtcactgaggataaggggcatctgtagatggatcgtgtgttcagggtgaccctaggctgcacctgcaggagagtataaaatggataaatgtattcattctggaagcggggtaaccttccttaccagttccgccaggacctgtcgaatagtttgagtgcactgctttagctccagtagctctgtacctgtaatataggaatccctggataccaggatccagaggtagccgtcagaacatcagggaaccctctaaactttgtgcctgtggtcccagctactgggaaggctgagcaaggaggatcacttgaactcaggagttcaaggcaagcctgggcaacatagtgagaccctgtcttcttcaaaaaagaaaaaaagactggaaactttgcatacaggtgtgcacattcttccaactttcgaaggaattcaaagcccctgaaaaatgaagggaaatgaaaaatgcggtaagatgcagtgagagactttgttcatctcatttgattagtttccctcaaaatgaactttcatttttggcattgcatagcctagaaaaggcatcactgctgtgtcccgaggtgtgagtgtctttgatttttactggataaatgccagacttttctaaagagggagcagttcacattcatgccagtgtttgaggttctccacatcctcatggccacttttaattttagccattctgatgcttgtccagtggtgtctcattgtggttttaatttgtgcttttttattacaaatgggatcaaacaccttttcatgtttatttttctcttttgtgaagtgcctgtttaaaacttctttgttttatagcttttatttatttatttatttatttatttatttatttatttattttgagacagagtcttgcactgttacccaggctggagtgcagtggcgtgatcttggctcactgtaagctctgcctcctgggttcacgccattctcctgcctcagcctccagagtagctgggactacaggcagccgccaccatgcccggctcattttttgtatttttttttttttttttttttgagacagagtctcactctgtcacccaggctggagtgcagtggcacgatctcagttcactcagttcacctccgcctcccgggttcaagcaattctcctgcctcagcctattgagtagctgggactacaggcacgcaccaccatgccaggctaattttttatatttttagtagagatggggtttcaccatgttgcccaggctgttcttgaactcctgacctcaggtgatccactcgccttggcctcccaaagtgctgggattataagcatgagccgctgcacctggctgttacatagcttttttttatgcaactttcgtatataaacttttttcatcataaataggacttttcactttagtacctagctcatcccagtagcttttccagaactgctgtcttcaccacaaagctccctacgttttcccaatgcaaacctgagtgtttttagcattttaactttcctcacagagaagacatcgtggagcggataaatagatttgcaggcatttctgtgtcttctccagtgctgtctggaataattttctccaccacttctttcaagttatttgtctgcatctctctttttttttttttttgagatggagtctcgctctgttgcccaagctggagtacagtggtgcgatcttggctcactgccagctccgcctcctgggttcacaccattctcctgcctcagcctccagagtagctgggactacaggtgcccgccaccacacccggctaattttttgtatttttagtagagacggggtttcaccatgttagccaggatggtctcgatctcctgacctcgtgatccgcccgcctcggcctcccaaagtgctgggattataggtgtgagccaccgcgcccggccttgggtcatgatttccatcatcttagacctgttggtgctgaggttttctttaaccattggtagtctagacatcaacatgagcttcaatcatggtctgccttttttttttttttttttttttttttttttgagacggtttctcactgtcactcaggctagaatgcagtagcgtgatctcagctcactgcagcctctgcctcctgggtagctgggactataggcatgcaccaccacgcccagctaatttttgtattttttgtagagacaggattttgccatgttgtccaggctggtctcgaactcctgacctcaagtgatccacccgggtggtctgccatttttaaatcacacaacacattttgtcatgggtaagacccacgcatggaagctaggcagtttttgccctgaacatcttgaacagtcagcttgagttttctgcaagtcagcaagccttcaaacataacccttgaggccatcagatacagttttggttccttgagtcctataaactttttaaatcgttgaaaaaattgaactagaacaaagcaaaccatttgttgttttctttttcccccctgagacagagtctcgctctgtcgcccacgctggagtgcagtggcacagtcttggctcactgcaacctccatctccagggtgccagcgattcccatgtctcagcctcctgagtagctgggattacaggtacacaccaccacggccagctaatttttgtatttttaggagagacggttttgccatgttgaccaggctggtcttgaactcctggcctcaagtgatatacctgactcagcctcccaaagtgctaggattacagacgtgagccaccatgtccggcctccttggttgctttttaacagcaaataatcttttttttttttccaagttgtgtgctttctccaaatttgttttttttcttcttcttcttctttttttttcccttgaaacagggtctcactttgttacccaggctggagtgcagtggtgccatcacggctcactgcagcctgtaccttctgggctcaattgagcttcctgcctcagcctcctaagtagctgggactataggggtatgtcaccatccctggctgattttttatatttttttggagagacaaggtcttaccgtattgcccagggtggtctcaaactcctgggctcaagtgatcctcccaccttggtttcccaaagtgctgggattgtagttgtgagccactgagcctgaccttgggtcacttttcatgagcattttcagtatgccagtctctgctctggctagaagcaatgcagtggtagaaaagagactggcaactctctttaaggaatcgagattctttaaggggaaggttattgaaaatgttacttaggctgtttttcttaaatttccaaagattgtctcttagtaaggttgatttttctggaatctttttttggtctgtttctataatgtatgaataagtcacactatgtgtgttttattctgtatcctgcctggttttccatttatgagactctgtagaaaggatgcttgataaaggcttttctggaaggaaggaaggaagagggagggagggagggaaggagggagggacagaaccctgtagatctctgggtgtaaaggacacaggaggcacactgttggaataagtgagccagcccaattccatagaaagaaagaagagctcagaaaagcccaaacatcatatccaggaattagccaagatgggttggctactcaactacaatgtgattgtccgcaccagtcttcccgactttcctgccagtgccgcaagtaacaggcatcagtaactgcatgatgtgtgtagctgttggacattgagtagccttttgtgtgcacagtgcttggagatggctgtttttccagtggagcaatgtgcagtgctgtgagctgtaaagttgtctaaagcaagtgtgtcttggtgcccttggctgggtgaacattcctagaaatgccaggggccagcctgagtgcacgggacccagtgattcctatacttgcttctttcatgcagaggtgttctgaggctcacctgtgcttttagaagcacaaaggggcttcgagtgaccaatcagatgtgcctgctgcaggtccactcgtctctaaatgctctgacctatggactgttgtccatagttgagaagaagctagagtaaaataaaatgtatgagtgagtgaatctttttctttttttttttcttttctctttttgagacagggtgttgctctgttgcccaggctggaaggcaggggcccgagctcagctcactgtagcctcaacctcccaggttgaagagatcctcctgcctcagccccaggagtactgggactacaggtacacactgccatgcccagcttattctttgtattgacgggatctcgccgtgttgcccaggatggtctcgacctcctgagctcaagtgattcatcccgccttggcctcccagggtgctgggattgcagatatgggacaccatgcccagccgaggaagtgtgaatttctgatcttgggctagcttaccacagtactaattaaactattcagttcaggggattagttaattgttgttatttcagttttggtttttcacttatcttaaaagcctctcaaatagattagaggccccagagcttgtgttacacctctatccatctctcaactcatctggtaggcatttatgaagcgctggtactcttccctctgcacctatcttctgtgctgggcaagtactgtgccacctgcagggccatagctgtgatttaggttcattacagagttcttgagatgtctgcagggattctggaatttgatgtgactcggccactgggtggagggaacaccagtaatcaatactgtattgtccaccagctgagaggccaggctgtggtcgttggttttgtttttttgtttgtttggtttttgttttgttttgttttgttttttgtttttgttttgttttgtttttgagacggaatttcactcttgttgcccaggctggagtgcagtggtgcaatctcggctcaccacaacctccacctcccaggttcaagtgagtctcctgcctcagcctcctgagtagctgggattacagacatgagccaccacatgcccggctaattttgtgtttttagtagaggcggggtttctccatgttggtcaggctggtctcaaactcccgacctcgggtgatctgcccgcctctgcctcccagagtgctgggattacaggcatgatccactgccccaggcctttttttttttttttttttttttttaattaaagacagtttcactattgtcgcctaggctggagtacaatggatctcagctcactgcagcctccacctcccgggctcaagtgattctcctgcctcagcatcccaagtagctgggattacaggtgcccaccaccacacccggctaatttttgtagttttagtagagacagggtttcaccatgttggccaggctggtctcaaactcccgacctcaggttttctgcccgcctctgcctcccaaaatgctgggattgcaggcatgagccaccgggcctgtgcttttctttttttctttttgagacagtttcgctattgttgtctaggctggagtgcaatggcgtgacctcggctcactgccccctccacctcctgggttcaagtgattctcctgcttcagcctcccaagtagttgggactacagccacgcgccaccacacccagctaatttttgtagttttagtagagacagggtttcaccatgttggtcaggctggtctcgaactcctgacctcgagtgatccgcccatctcggcctcccaaagtgctgagattccaggtgtgagccaccgcgcccagcctgtggtgttgttcttatactgaagactcatctggaagctgtttttctctcattaaaagcggggacagtcagaattgttaccagtgaggaaacactctggcgaccctgttcttatgcaccccagtagttgtgtgtgtatcacctgctgcttgccagcagcccctgggctcagtgctcaggacaggcctcagtttggtaccatccacaggcaagctgggtatgactcacaagagaccataaagactcagtacgcgcactgtcatggctggggcactgggagtgtcataccctttccaggtgtccacacctaattagtgggtcatcttggcagagggtgggggcatgttggagctgtagaaagctggggtcatttctagccacagaagaatttgcttttgctcccagctaaacccaaggctttccccaagggccagcactgttaccagagcctccttttctagatttcatgcggacagtacattgtgccggccctggtaagtttggtcctgatggtgaggttgactgattgtccccagatttcccttttcaccgtctgcagtctcctctaagaggaaaggggagcacgtttcagtggctccacgtatgtggattatattctcatcctcaaatcaaagacctttatactcagtcctgcattcttcctgcatggccgtttgtgtatgtcaggatgccatttgggaaacaaaatccactctaattattcctaagcttagtggattttaacatggaaggagaagcctaaatcagcagtgtctgggctgggtctccaggaataactcttgacctcgaagcattgacccacctagggagctgctgtgtctgctccatgaagaaggtctggaggcggcatccaccccctgcactcatatctttgggttcgtgtagacagtactgcagaccctttctagggaggagaggcctgggctcaagacatagcagcctctgccagaagtgtttcttcaggatgcagctgtgcctgccagtgccaacaccctcagcagctcaaatcggcctccatcccctgccctgccagtagcatgagtgtgtctgtttgagggaactcggttcacgtctaggatcctggctgcacgggagtcagagtagaggattagagcttcttgtcactgtagggcaggatgtcctgcccaggggacaggcagggtgaggtgagcagtagggctttggtggtgagaactttcctgaaacagcccctcctacgtgctcagcaagagggaaagggcgttccactggcccccctagatgggtaagagcacttggccagaaggtgggaggaaccacgtttgaaactgttggagcagaaattgtctagatgtaagttctgagctggcaggtgagaggcttgtcaggttcttaggcccccaggacagagaattggattgtgttcaatccttggtgtgtgtcacacgcattggtcatgcatagcctgcttttctctgttagttacttgtaacaacctactgagcaatgcaaatcctcctccacatgaaggctccaccttggcagtggcctacattggtcgcgtcagcttgagagagcatcatgcccctagtgctgtctaaatgttcactgcctcacgtaaccctcacaacagcacagtcagatgtgggctctggtgactctgcttcagaagagaaagctgcagcccccagatagtaagtaaggtccccaggtcttgcagtcagcacatggtgtggctgtggcagcccccagatagtaaggaaggtccccaggtcttgcagtcagcacatggtgtggctgtggcagcccccagatagtaaggaaggtccccaggtcttgcagtcagcacatggtgtggctgtggcagcccccagatagtaaggaaggtccccaggtcttgcagtcagcacatggtgtggctgtggcagcccccagatagtaaggaaggtccccaggtcttgcagtcagcacatggtgtggctgtggcagcccccagatagtaaggaaggtccccaggtcttgcagtcagcacatggtgtggctgtggcagcccccagatagtaaggaaggtccccaggtcttgcagtcagcacatggtgtggctgtggcagcccccagatagtaaggaaggtccccaggtcttgcagtcagcacatggtgtggctgtggctgtgttcacgctccaggagactccactaaacacccagcagggagagacacagcacatcagctgggaggtggagtgacttgggaagtgggcttgactgactgggagaggtgcacagatcctctgtgggtgggaggagggtggggcctctgctgctcaccagagggttccacagagggtgtcacacgtcagaaaaaagaaatggcttcgtttatcacttatatcaaactgattgcttctttctcttttgtttttctccttctgtttacaagattgttgacggtgagtggtttcgtttcctttttcactgggtttggagaggaaactggcataggtgagagccgcggtgctgcaggtcttgccagaccatccccaagggcttggagcgctccaagcaggaagatgccttcgcagatgctgtggtcagacccacacagccagtcccccttgtgcctgctgaagaaacttcaccactatcattgagcactgagctatagtcctttcttgtggcctaccagattttggagaaggctggtagctcacagcaggggttggggggtttctcctgggaagataagatagtggcctccagagctgggcagaaccttctgggttatagctgagcatggcagcagtttgtctctgggggtcccaggcagggaaggaagagggtcttaagaggcgtcaggatgggagtggtgaggatggtaagagtagagagcctccaacctgaaaatgtgacctcttaccttagaaagaagaagaccaaggaggaatgctaggaggctgccccaggaccatgctgacagctgtgtggtgagcagtgacgatgaggagttgtccagggacagagacgtatatgtgactacccatactcccagaaacgccagggatgagggcgctacaggcctcaggtaccaacgtgcccccagctctgctgccgccatgctaggatgtggggccagggcatgggaatacttttcagcaaatctgtgagcccttggccctggaagggcttgcccaagcctctacccagcatctggatacagttggaactgggtccagaactgagtccagctattcccactgtaaccagaggatgccaagcgctgacacagtgtgtgcagacagtcccagtggccccagacagggatcctggggctggtaggggcctgggggagggcagggtgactcaggttgtgtgcaccttctcatgttcaccctcccacatgcccttggggcagttggctttcctgaaagtctctcggatgcccgcgctaaggcagagtcaggaggccagggacgggactcttgtaggggataggggccactcacgtgacagggtataataaaatgtttgcgttgactgagaaactaacgtgaagcactgtgctcttaggccctcaggtactgtcagttgtcccatctgcatggacggatactcagaggtaagtaaaccaagctgtatcttccaggcttctggtttctaaacttcactgaaagaattggatgagacaggatcttccccctcggtgggattggacacccctactcacagtcatgcctgggccgtcacttattgcagatctgcctgtgaggggagaatgtgccagtttctccttggaccctacaactttcaccttcagcccctatactcctgtatgccctgagcttccgggtgcaaatgcgtcctccttttttgtgccccatcctggctctaactgaaagctgctagtgtttactggggtccctcataaccctcttgggctgtcacactgttgagatgccatggcccctgcctcctgctctccagctgagagagaccacagcagacacagttagctctccagacccctccctgttgtagcctggcccttgctttcctttaattagtcatcttaggcataggtgggtgggattctctggccccatggctgctctgggacaagggcaaactcggaggctcttctttttaatgccttctagatcgtgcagaatggacgtctcatcgtttccacagaatgcggccatgtcttctgtagccagtgcctccgtgattccctgaagaatgctaatacttgcccaacttgtaggaaaaagatcaaccacaaacggtaccaccccatttatatatgaagtattcagagccccccaggagagacggatggacagacagacagccaggttctccagtggtatctgcctccattttcctgagatcaaaaagactgtttcgaaaccaacatctgatatgtaaactgctcttttgtttccaaccccttccttttgttatctccagtttgatgctatggcgctggacccagggccctcccaggccatctctgttcctctggggtggtccagttctagagtgggagaaagggagtcaggcgcattgggaatcgtggttccagtctggttgcagaatctgcacatttgccaagaaattttccctgtttggaaagtttgccccagctttcccgggcacaccaccttttgtcccaagtgtctgccggtcgaccaatctgcctgccacacattgaccaagccagacccggttcacccagctcgaggatcccaggttgaagagtggccccttgaggccctggaaagaccaatcactggacttcttcccttgagagtcagaggtcacccgtgattctgcctgcaccttatcattgatctgcagtgatttctgcaaatcaagagaaactctgcagggcactcccctgtttcctaagaacgaaaaagtgcaataaaggccattcgttacctacttttcagcagcccacaagatgtagcactattagtgtccccctcagaggcttaatgttgcctgtggagcagtgcccatcccagcccgtttctgcccaccagttgttctcaggaaccttacccatgctccagcgtccttcacctggcacaggacatgcaagataaatagggcaggcacgtgtttgggtgtcctctcttttctgataaaatccatcccgtgtttgccacacgccctccagtcctcagttcccactgcctaacgtctgcccccgtgtagatactgagaggtggtggcagtaattgtggccttatcagccgctcagttccaggcttttgcccaggtcactgttgccccatgttcggagaacctggcccacctgtcttggctttctcatccttcccaacccagtgccgtttatttcagaagcttcctggccactgggcttggatgcttcgggcttctgactgctccataggttttgactggtgaaacaggggcccagatgacaacctctccttcgctccacaggtacgcgggagcctcaggttctctcaggggcagcaaagtggcccaagctgcccctgacagcacagggcctggggggtggctaacgagagaggccttacagtgccggcatgcctcctcttccactgtcgtccttcctcagagggcctcacgccaaacaaacggccttttcgtgtgaaacatcttcagggcgggaaaggggccacttctggctttgttagcaataactgaccttcagtttacccttctgaaggagcagggactcagcacagaattcactttagacggggctgaaggagtgtccctcctctatgtgaaaagaaaattgttttattcttcattctgactttttaactgtttggctcacttccagttagtttgaatgaaaataataattttctacttggagttgaagagggcagaatccgcagctctcatcattgtgatgtgtagcatgtctgccctctgactggacatcattgccattaactttcttctgggcatcacggcaatgtcacgatgcccagacttggagcaaggcaaccttggagtcagtccactcataaaatatggtaacacccattttaaaatttaagttttgtccttaaagacaacttcagtggttaattataaaagttgtgttacttcgtcctaaattaaattgatagaaagatttaaaaatgtgttttgtttctactattcagaaactgcgaactagggaaaggttggtatgaagaaatgtctttccttttttcaatgtacatagttcaactctttctttgttacatttaaactatatccatggatatcagtctgctttggactcctctgctagtgttacagatggaaataaaaccattaatttgaaccaaatatcttttacacattcatttgctctttggaatcaatttcccccctttttgccaaggtgcggggttcttatctgcctcacgttgagtgtattttgcattggtgtgtgttcaggaagtttccatgtcctaaatccagcaagcatgtgagaggctgttcttggagcacagccacaagcccaagccctggagtccctaagagagcagagtctactctgagaggcaaggttgaccaaggagctgtctgctcagctcggccagtctctcagaggtgctgggggtgctgctctgagtgggatggactgagattgccctggaaaccttgcactgcagcacccccctttgcccctgaccacctagatacaaaatttgccctctgagtgggagtcagcactgggagtgcatggatatgccagccactgccacaggcgagcagtgccagcaaagccacaaggagggaatgggcttggcagtgtggccaagctctccctttgcctctgccctctgtacctatccagctgtccccagggactagaaaggctaacatgctggctgcctgggtcccaaaggcctaccatccagtgcagtttgcttaccatgctcctggcactgcacttttggctctgtgggcagtgagacagacatcatggaacatgtttacagaggagacagtcccccaggccactggaaaattgaaactgatgagggtggggtacgggaaaccaggagatccagcaggaagaagttgaagctgtccagaaagctctctctgaataagggctgctaagttgccatcttcaaggtccagaaagctctctagggaaagaggaaagaattccagagaccccaggccaggcctgtgaaagttatgagaaagagcttcttgctggcatacagtagggtctgcaggctccccgatacctaaaggcattggaccagacacttctggtggctacccagggcctggcagttctttaccccaggagcaagcctaggggaggcagggagcagtgtatccctaagactggtactgctggagtgggtctggtcctggaaaggagggagcccccaaggctggctatagaaactcaaaagatgtctgtattaactttttcggtgggggggtggttttgttttgttttggcagcatagaaacaattgattctctatattgtgtatccagaatccttgctatttttttttttttcctaagacggagtctggctctgtcgcccaggctggagtgcagtggctcgatctcagctcactgcaacctccgcctcccaggttcaagcgattctcctgcctcagccacccaaccagctgggattacagggacgtgccaccatgtccagctaatttttgtagttttcgtagatacgggctttcaccatgttggccaggctggtctcaaactcctgatctcaagtgatccgcccgcctcggcctcccaaagtgttgggattacaggcgtgagtcaccactcccagccccaactctattttt
